(19) United States
(12) Patent Application Publication
(10) Pub. No.: US 2023/0357766 A1
(43) Pub. Date: Nov. 9, 2023

(54) PRIME EDITING GUIDE RNAS, COMPOSITIONS THEREOF, AND METHODS OF USING THE SAME

(71) Applicants: The Broad Institute, Inc., Cambridge, MA (US); President and Fellows of Harvard College, Cambridge, MA (US)

(72) Inventors: David R. Liu, Cambridge, MA (US); James William Nelson, Cambridge, MA (US); Peyton Barksdale Randolph, Cambridge, MA (US); Andrew Vito Anzalone, Cambridge, MA (US); Simon Shen, Cambridge, MA (US); Kelcee Everette, Cambridge, MA (US); Peter J. Chen, Cambridge, MA (US)

(73) Assignees: The Broad Institute, Inc., Cambridge, MA (US); President and Fellows of Harvard College, Cambridge, MA (US)

(21) Appl. No.: 18/028,183

(22) PCT Filed: Sep. 24, 2021
(86) PCT No.: PCT/US2021/052097

§ 371 Date: Mar. 23, 2023

Related U.S. Application Data
(60) Provisional application No. 63/231,231, filed on Aug. 9, 2021.
(60) Provisional application No. 63/182,633, filed on Apr. 30, 2021.
(60) Provisional application No. 63/091,272, filed on Oct. 13, 2020.
(60) Provisional application No. 63/083,067, filed on Sep. 24, 2020.

(51) Int. Cl. C12N 15/113; C12N 9/22

(52) U.S. Cl. CPC C12N 15/113; C12N 9/22; C12N 2310/20; C12N 2310/3519; C12N 2310/531

(57) ABSTRACT

The disclosure provides modified pegRNAs comprising one or more appended nucleotide structural motifs which increase the editing efficiency during prime editing, increase half-life in vivo, and increase lifespan in a cell. Modifications include, but are not limited to, an aptamer (e.g., prequeosim-1 riboswitch aptamer or “evopreQi-1”) or a variant thereof, a pseudoknot (the MMLV viral genome pseudoknot or “Mpknot-1”) or a variant thereof, a tRNA (e.g., the modified tRNA used by MMLV as a primer for reverse transcription) or a variant thereof, or a G-quadruplex or a variant thereof. The disclosure further provides prime editor complexes comprising the modified pegRNAs and having improved characteristics and/or performance, including stability, improved cellular lifespan, and improved editing efficiency. The disclosure also provides methods of editing a genome using the prime editor complexes with modified pegRNAs, and to nucleotide sequences and expression vectors encoding said prime editors and modified pegRNAs, and to cells, kits, and pharmaceutical compositions comprising the improved prime editor complexes.

### RELATED APPLICATIONS

[0001] This application claims the benefit of U.S. Provisional Application Ser. No. 63/231,231, filed Aug. 9, 2021, U.S. Provisional Application Ser. No. 63/182,633, filed Apr. 30, 2021, and U.S. Provisional Application Ser. No. 63/083,067, filed Sep. 24, 2020. In addition, this application claims the benefit of U.S. Provisional Application Ser. No. 63/091,272, filed Oct. 13, 2020, the contents of each of which are incorporated herein by reference.

### GOVERNMENT SUPPORT

[0002] This invention was made with government support under grant numbers AI142756, HG009490, EB022376, and GM118062 awarded by the National Institutes of Health. The government has certain rights in the invention.

### BACKGROUND OF THE INVENTION

[0003] Prime editing (PE) is a nucleic acid editing platform that enables the targeted and programmable installation of defined changes in a nucleotide sequence at a desired locus. It involves targeting of a prime editor to a target site in the genome, wherein the prime editor comprises a nucleic acid programmable DNA binding protein (napDNAbp) fused to a polymerase (e.g., a reverse transcriptase (RT)) associated with a prime editing guide RNA (pegRNA). The pegRNA comprises a scaffold (which binds to the napDNAbp), a spacer sequence (which is complementary to the genomic site), and an extension arm at the 3′ or 5′ end of the pegRNA. The extension arm includes a DNA synthesis template which includes the sequence of the desired edit. During prime editing, once the prime editor complexed with the pegRNA localizes to the genomic site, the polymerase (e.g., reverse transcriptase) synthesizes a new strand of DNA containing a desired edit using the DNA synthesis template. The new strand of DNA then replaces the corresponding endogenous DNA strand at the genomic site, thereby installing the desired, edited nucleotide sequence into the genome at the edit site.

[0004] Despite the many advantages of prime editing over other modes of genome editing, such as the ease of programming the DNA synthesis template to specify the desired edit, it remains desirous to further enhance the characteristics and performance of prime editing, including, for example, the efficiency of installing desired edits and/or reducing indel formation.

[0005] Modifications to prime editing and/or to the components thereof which result in increased editing efficiencies and/or increased specificity would significantly advance the field of genome editing.

### SUMMARY OF THE INVENTION

[0006] The present disclosure provides next-generation pegRNAs with improved properties, including, but not limited to, increased stability, increased half-life in vivo, and/or improved binding affinity for a napDNAbp and/or a target DNA sequence. These improved properties may be achieved in various ways, including, but not limited to, appending three-dimensional RNA structures, such as stem loops, to pegRNAs to increase their stability, or modifications to reduce the binding affinity of the primer binding site (PBS) of the pegRNA extension arm to the spacer sequence of the pegRNA (e.g., through occluding the PBS with toeholds that dissociate upon napDNAbp binding, providing the 3′ extension arm in trans, or introducing chemical and/or genetic modifications to the pegRNA, as described further herein). These modified pegRNAs result in improved activity and/or efficiency of prime editing when used in conjunction with a prime editor, such as a fusion protein comprising a napDNAbp domain (e.g., a Cas9 domain) and a polymerase domain (e.g., a reverse transcriptase domain. In particular, the inventors have discovered that pegRNAs may suffer from various deficiencies, including reduced affinity to a nucleic acid programmable DNA binding protein (e.g., a Cas9 nickase), increased susceptibility to degradation compared to canonical single guide RNAs (sgRNAs) (in particular, degradation of the extension arm), and tendency toward inactivation due to unwanted duplex formation between the extension arm (specifically, the primer binding site of the extension arm) and the spacer sequence in the pegRNA, thereby competing against the binding of the pegRNA to a target DNA. Without wishing to be bound by any particular theory, these issues arise because of the presence of the extension arm that is an integral part of the pegRNA which is not present in typical sgRNAs. To overcome these deficiencies, the present inventors have discovered that pegRNAs may be modified in one or more ways to improve their overall stability and/or performance in prime editing.

[0007] First, the inventors have discovered that appending one or more RNA structural motifs to a pegRNA can protect against degradation of the pegRNA. Such RNA structural motifs can include, but are not limited to, a prequeosine1-1 riboswitch aptamer (evopreQ1) and variants thereof, a frameshifting pseudoknot from Moloney murine leukemia virus (MMLV)22, hereafter referred to as “mpknot,” and variants thereof, G-quadruplexes, hairpin structures (e.g., 15-bp hairpins), and a P4-P6 domain of the group I intron.

[0008] Second, the inventors have discovered various ways to reduce the formation of a duplex between the primer binding site (PBS) of the extension arm and the spacer sequence of the pegRNA (i.e., reducing PBS/spacer binding interactions). In one embodiment, PBS/spacer binder interaction is avoided by stabilizing the 3′ extension arm, including, but not limited to, (i) occluding the PBS with toeholds that dissociate upon napDNAbp (e.g., Cas9 nickase) binding, (ii) providing the 3′ extension arm in trans, i.e., moving the 3′ extension arm or portion thereof (e.g, PBS and/or PBS and the DNA template portions) from the pegRNA to another molecule, e.g., the nicking gRNA, and (iii) introduction of chemical and/or genetic modifications to pegRNA that favor RNA/DNA duplex formation but disfavor RNA/RNA duplex formation, thereby promoting the desired interaction between the PBS of the pegRNA and the target DNA.

[0009] Collectively, the modified pegRNAs disclosed herein resulting from the implementation of these strategies are referred to herein as “engineered” pegRNAs or “epegRNAs.”

[0010] In another aspect of the disclosure, the inventors have developed a novel computational algorithm, which may be embodied in software, for identifying one or more nucleotide linkers for coupling a prime editing guide RNA (pegRNA) to a nucleic acid moiety, such as, but not limited to, an aptamer (e.g., prequeosin₁-1 riboswitch aptamer or “evopreQ₁-1”) or a variant thereof, a pseudoknot (the MMLV viral genome pseudoknot or “Mpknot-1”) or a variant thereof, a tRNA (e.g., the modified tRNA used by MMLV as a primer for reverse transcription) or a variant thereof, or a G-quadruplex or a variant thereof, to form or result in an engineered pegRNA. The computational technique, which may be referred to herein as the pegRNA Linker Identification Tool (“pegLIT”), involves efficiently evaluating nucleic acid linker candidates to identify those which have lower propensity for base pairing to other regions of the pegRNA (e.g., regions comprising the primer binding site, spacer, DNA synthesis template, and/or gRNA core).

[0011] In addition, the present disclosure provides for nucleic acid molecules encoding and/or expressing the epegRNAs, as well as expression vectors and constructs for expressing the epegRNAs described herein, host cells comprising said nucleic acid molecules and expression vectors, and compositions for delivering and/or administering the epegRNAs in conjunction with a prime editing system described herein. In addition, the disclosure provides for isolated epegRNAs, as well as compositions comprising said epegRNAs as described herein. Still further, the disclosure provides for prime editor systems comprising (a) a prime editor (e.g., a complex or fusion protein comprising a napDNAbp (e.g., Cas9 nickase) and a reverse transcriptase or other RNA-dependent DNA polymerase) and (b) an epegRNA disclosed herein. Still further, the present disclosure provides for methods of making the epegRNAs disclosed herein, as well as methods of using the epegRNAs in methods of prime editing for introducing one or more changes into a target nucleic acid molecule, e.g., a genome, with improved efficiency as compared to a prime editor and uses a pegRNA. The specification also provides methods for efficiently editing a target nucleic acid molecule, e.g., a single nucleobase of a genome, with a prime editing system described herein (e.g., in the form of a prime editor as described herein or a vector or construct encoding same and an epegRNA described herein) or any prime editing system described previously. Still further, the specification provides therapeutic methods for treating a genetic disease and/or for altering or changing a genetic trait or condition by contacting a target nucleic acid molecule, e.g., a genome, with a prime editing system described herein or describe previously which utilizes an epegRNA described herein.

[0012] In a particular embodiment, it has been surprisingly found that by appending a nucleotide structural motif to the end of the extension arm of a pegRNA, including not but limited to, an aptamer (e.g., prequeosin₁-1 riboswitch aptamer or “evopreQ₁-1”) or a variant thereof, a pseudoknot (the MMLV viral genome pseudoknot or “Mpknot-1”) or a variant thereof, a tRNA (e.g., the modified tRNA used by MMLV as a primer for reverse transcription) or a variant thereof, or a G-quadruplex or a variant thereof, a consistent increase in editing efficiency was achieved. Thus, the present disclosure provides modified pegRNAs comprising one or more appended nucleotide structural motifs which improve the editing efficiency of prime editors when complexed therewith. In addition, the disclosure provides prime editing complexes comprising a prime editor complexed with a engineered pegRNA disclosed herein, as well as to nucleotide sequences and expression vectors encoding said modified pegRNAs, and optionally which may also encode the prime editors on the same or different vector molecules. Still further, the disclosure provides genome editing methods based on prime editing that involve the use of a prime editor associated with a modified pegRNA as disclosed herein to install a desired nucleotide sequence change at a desired site in a nucleic acid characterized by an editing efficiency that is higher than prime editing that uses a pegRNAs (i.e., those pegRNAs not modified in the manner described herein). The disclosure also provides cells and kits comprising the disclosed modified pegRNAs, or prime editing complexes comprising said modified pegRNAs. The present disclosure also provides methods of making the disclosed modified pegRNAs comprising coupling one or more structural nucleotide motifs (e.g., aptamers, G-quadruplexes, tRNAs, or pseudoknot) to the terminus of the extension arm of a pegRNA, optionally through a nucleotide linker. The disclosure further provides methods for delivering the modified pegRNAs and optionally, prime editors to target cells for conducting genome editing at a desired target site, as well as methods for treating genetic disorders using prime editing in combination with the disclosed modified pegRNAs.

[0013] The process of prime editing may introduce at least one or more of the following genetic changes into a nucleic acid (e.g., genome): transversions, transitions, deletions, and insertions. In addition, prime editing may be implemented for specific applications. For example, prime editing can be used to (a) install mutation-correcting changes to a nucleotide sequence, (b) install protein and RNA tags, (c) install immunoepitopes on proteins of interest, (d) install dimerization domains in proteins, (e) install or remove sequences that alter the activity of a biomolecule, (f) install recombinase target sites to direct specific genetic changes, and (g) mutagenize a target sequence by using an error-prone RT, as well as other purposes. And, with the modified pegRNAs described herein, these applications of prime editing may be conducted with high efficiency and/or reduced occurrence of indels.

[0014] In a first aspect, the disclosure provides a pegRNA for prime editing comprising a guide RNA and at least one nucleic acid extension arm comprising a DNA synthesis template and a primer binding site, wherein the extension arm comprises a nucleic acid moiety attached thereto selected from the group consisting of a toe-loop, hairpin, stem-loop, pseudoknot, aptamer, G-quadraplex, tRNA, riboswitch, or ribozyme. In certain embodiments, the nucleic acid moiety is attached to the 3′ end of the extension arm of the pegRNA. In other embodiments, the nucleic acid moiety is attached to the 5′ end of the extension arm of the pegRNA.

[0015] In various embodiments, the nucleic acid moiety is a Mpknot1 moiety having a nucleotide sequence selected from the group consisting of: SEQ ID NO: 195 (Mpknot1), SEQ ID NO: 196 (Mpknot1 3′ trimmed), SEQ ID NO: 197 (Mpknot1 with 5′ extra), SEQ ID NO: 198 (Mpknot1 U38A), SEQ ID NO: 199 (Mpknot1 U38A A29C), SEQ ID NO: 200 (MMLC A29C), SEQ ID NO: 201 (Mpknot1 with 5′ extra and U38A), SEQ ID NO: 202 (Mpknot1 with 5′ extra and U38A A29C), and SEQ ID NO: 203 (Mpknot1 with 5′ extra and A29C), or a nucleotide sequence having at least 80% sequence identity therewith.

[0016] In other embodiments, the nucleic acid moiety is a G-quadruplex having a nucleotide sequence selected from the group consisting of: SEQ ID NO: 204 (tns1), SEQ ID NO: 205 (stk40), SEQ ID NO: 206 (apc2), SEQ ID NO: 207 (ceacam4), SEQ ID NO: 208 (pitpnm3), SEQ ID NO: 209 (rlf), SEQ ID NO: 210 (erc1), SEQ ID NO: 211 (ube3c), SEQ ID NO: 212(taf15), SEQ ID NO: 213 (stard3), and SEQ ID NO: 214 (g2), or a nucleotide sequence having at least 80% sequence identity therewith.

[0017] In still other embodiments, the nucleic acid moiety that modifies a pegRNA is an evopreq1 aptamer having a nucleotide sequence selected from the group consisting of: SEQ ID NO: 215 (evopreq1), SEQ ID NO: 216 (evopreq1motif1), SEQ ID NO: 217 (evopreq1motif2), SEQ ID NO: 218 (evopreq1motif3), SEQ ID NO: 219 (shorter preq1-1), SEQ ID NO: 220 (preq1-1 G5C (mut1)), and SEQ ID NO: 221 (preq1-1 G15C (mut2)), or a nucleotide sequence having at least 80% sequence identity therewith.

[0018] In still other embodiments, the nucleic acid moiety is a the tRNA moiety having a nucleotide sequence of SEQ ID NO: 222, or a nucleotide sequence having at least 80% sequence identity therewith.

[0019] In yet other embodiments, the nucleic acid moiety has a nucleotide sequence of SEQ ID NO: 223 (xrn1), or a nucleotide sequence having at least 80% sequence identity therewith.

[0020] In other embodiments, the nucleic acid moiety has a nucleotide sequence of SEQ ID NO: 224 (grp1 intron P4P6), or a nucleotide sequence having at least 80% sequence identity therewith.

[0021] Any of the nucleic acid moieties described herein can be attached to the pegRNA, e.g., to the 3′ end of the pegRNA, by a linker, e.g., a nucleotide linker. The linker can have a nucleotide sequence selected from the group consisting of SEQ ID NOs: 225-236. The linker can be of any suitable sequence. Optionally, the linker sequence can be determined empirically for each pegRNA.

[0022] The linker can be of any suitable length. In certain embodiments, the linker is at least 3 nucleotides, at least 4 nucleotides, at least 5 nucleotides, at least 6 nucleotides, at least 7 nucleotides, at least 8 nucleotides, at least 9 nucleotides, at least 10 nucleotides, at least 11 nucleotides, at least 12 nucleotides, at least 13 nucleotides, at least 14 nucleotides, at least 15 nucleotides, at least 16 nucleotides, at least 17 nucleotides, at least 18 nucleotides, at least 19 nucleotides, at least 20 nucleotides, at least 21 nucleotides, at least 22 nucleotides, at least 23 nucleotides, at least 24 nucleotides, at least 25 nucleotides, at least 26 nucleotides, at least 27 nucleotides, at least 28 nucleotides, at least 29 nucleotides, or at least 30 nucleotides in length.

[0023] In a preferred embodiment, the linker is at least 8 nucleotides in length.

[0024] In various embodiments, the extension arm of the pegRNA is positioned at the 3′ or 5′ end of the guide RNA, or at an intramolecular position in the guide RNA, and wherein the nucleic acid extension arm is DNA or RNA.

[0025] In various embodiments, the pegRNA is capable of binding to a napDNAbp and directing the napDNAbp to a target DNA sequence. The target DNA sequence can comprise a target strand and a complementary non-target strand. The guide RNA can hybridize to the target strand to form an RNA-DNA hybrid and an R-loop.

[0026] In various embodiments, the length of the extension arm can vary, and depends upon the length of the DNA synthesis template. In certain embodiments, the nucleic acid extension arm is at least 5 nucleotides, at least 6 nucleotides, at least 7 nucleotides, at least 8 nucleotides, at least 9 nucleotides, at least 10 nucleotides, at least 11 nucleotides, at least 12 nucleotides, at least 13 nucleotides, at least 14 nucleotides, at least 15 nucleotides, at least 16 nucleotides, at least 17 nucleotides, at least 18 nucleotides, at least 19 nucleotides, at least 20 nucleotides, at least 21 nucleotides, at least 22 nucleotides, at least 23 nucleotides, at least 24 nucleotides, at least 25 nucleotides, at least 26 nucleotides, at least 27 nucleotides, at least 28 nucleotides, at least 29 nucleotides, at least 30 nucleotides, at least 31 nucleotides, at least 32 nucleotides, at least 33 nucleotides, at least 34 nucleotides, at least 35 nucleotides, at least 36 nucleotides, at least 37 nucleotides, at least 38 nucleotides, at least 39 nucleotides, at least 40 nucleotides, at least 41 nucleotides, at least 42 nucleotides, at least 43 nucleotides, at least 44 nucleotides, at least 45 nucleotides, at least 46 nucleotides, at least 47 nucleotides, at least 48 nucleotides, at least 49 nucleotides, or at least 50 nucleotides.

[0027] The DNA synthesis template can also vary depending on the desired edit and can be at least 3 nucleotides, at least 4 nucleotides, at least 5 nucleotides, at least 6 nucleotides, at least 7 nucleotides, at least 8 nucleotides, at least 9 nucleotides, at least 10 nucleotides, at least 11 nucleotides, at least 12 nucleotides, at least 13 nucleotides, at least 14 nucleotides, or at least 15 nucleotides in length.

[0028] In various embodiments, the desired edit is a single nucleotide substitution, or a single nucleotide deletion, or insertion. The desired edits can also be of any length capable of being installed by prime editing, and can include deletions, insertions, or inversions.

[0029] The primer binding site can also vary in length and can be, for example, at least 3 nucleotides, at least 4 nucleotides, at least 5 nucleotides, at least 6 nucleotides, at least 7 nucleotides, at least 8 nucleotides, at least 9 nucleotides, at least 10 nucleotides, at least 11 nucleotides, at least 12 nucleotides, at least 13 nucleotides, at least 14 nucleotides, or at least 15 nucleotides in length.

[0030] In another aspect, the disclosure provides pegRNAs for prime editing comprising (i) a guide RNA comprising a spacer and (ii) at least one nucleic acid extension arm comprising a DNA synthesis template, a primer binding site, a toehold motif, and an additional nucleic acid moiety, wherein the toehold motif occludes interaction of the primer binding site and the spacer when the PEgRNA is not bound by a prime editor, but does not occlude interaction of the primer binding site and a protospacer sequence on a target DNA molecule when the PEgRNA is bound by a prime editor. In some embodiments, the toehold motif and the additional nucleic acid moiety are attached to the 3′ end of the extension arm. In some embodiments, the toehold motif is attached to the 3′ end of the extension arm, and the additional nucleic acid moiety is attached to the 3′ end of the toehold motif. In some embodiments, the toehold motif is attached to the PEgRNA by a linker.

[0031] In another aspect, the disclosure provides pairs of PEgRNAs for prime editing comprising (i) a first PEgRNA comprising a guide RNA, wherein the guide RNA comprises a spacer; and (ii) a second PEgRNA comprising a second strand nicking guide RNA, wherein the second strand nicking guide RNA comprises at least one nucleic acid extension arm comprising a DNA synthesis template and a primer binding site. In some embodiments, the first PEgRNA and the second PEgRNA are each capable of binding to a nucleic acid programmable DNA binding protein (napDNAbp) of a prime editor and directing the napDNAbp to a target DNA sequence.

[0032] In another aspect, the disclosure provides a PEgRNA comprising (i) a guide RNA comprising a spacer and (ii) at least one nucleic acid extension arm comprising a DNA synthesis template and a primer binding site, wherein the primer binding site comprises one or more modified nucleotides, wherein the one or more modified nucleotides result in a greater reduction in binding affinity of the primer binding site to the spacer than of the primer binding site to a protospacer sequence on a target DNA molecule. In some embodiments, the one or more modified nucleotides comprise genetic mutations. In some embodiments, the one or more modified nucleotides comprise chemically-modified nucleotides.

[0033] In another aspect, the disclosure provides a complex for prime editing comprising:
[0034] (a) a fusion protein comprising a nucleic acid programmable DNA binding protein (napDNAbp) and a domain comprising an RNA-dependent DNA polymerase activity; and
[0035] (b) any pegRNA described above which comprises a nucleic acid moiety appended to the end of the extension arm.

[0036] In some embodiments, the napDNAbp of the prime editing complex comprises an endonuclease having nucleic acid programmable DNA binding ability. In some embodiments, the napDNAbp comprises an active endonuclease capable of cleaving both strands of a double stranded target DNA. In some embodiments, the napDNAbp is a nuclease active endonuclease, e.g., a nuclease active Cas protein, that can cleave both strands of a double stranded target DNA by generating a nick on each strand. For example, a nuclease active Cas protein can generate a cleavage (a nick) on each strand of a double stranded target DNA. In some embodiments, the two nicks on both strands are staggered nicks, for example, generated by a napDNAbp comprising a Cas12a or Cas12b1. In some embodiments, the two nicks on both strands are at the same genomic position, for example, generated by a napDNAbp comprising a nuclease active Cas9. In some embodiments, the napDNAbp comprises an endonuclease that is a nickase. For example, in some embodiments, the napDNAbp comprises an endonuclease comprising one or more mutations that reduce nuclease activity of the endonuclease, rendering it a nickase. In some embodiments, the napDNAbp comprises an inactive endonuclease, for example, in some embodiments, the napDNAbp comprises an endonuclease comprising one or more mutations that abolish the nuclease activity. In various embodiments, the napDNAbp is a Cas9 protein or variant thereof. The napDNAbp can also be a nuclease active Cas9, a nuclease inactive Cas9 (dCas9), or a Cas9 nickase (nCas9). In a preferred embodiment, the napDNAbp is Cas9 nickase (nCas9) that nicks only a single strand. In other embodiments, the napDNAbp can be selected from the group consisting of: Cas9, Cas12e, Cas12d, Cas12a, Cas12b1, Cas12b2, Cas13a, Cas12c, Cas12d, Cas12e, Cas12h, Cas12i, Cas12g, Cas12f (Cas14), Cas12f1, Cas12j (Cas(Φ), and Argonaute and optionally has a nickase activity such that only one strand is cut. In some embodiments, the napDNAbp is selected from Cas9, Cas12e, Cas12d, Cas12a, Cas12b1, Cas12b2, Cas13a, Cas12c, Cas12d, Cas12e, Cas12h, Cas12i, Cas12g, Cas12f (Cas14), Cas12f1, Cas12j (Cas(Φ), and Argonaute and optionally has a nickase activity such that one DNA strand is cut preferentially to the other DNA strand. In various embodiments, the domain comprising an RNA-dependent DNA polymerase activity is a reverse transcriptase comprising any one of the amino acid sequences of SEQ ID NOs: 32, 34, 36, 102-128, and 132.

[0037] The domain comprising an RNA-dependent DNA polymerase activity, in some embodiments, is a reverse transcriptase comprising an amino acid sequence having at least 80%, 85%, 90%, 95%, 98%, or 99% sequence identity with the amino acid sequence of any one of SEQ ID NOs: 32, 34, 36, 102-128, and 132. In other embodiments, the domain comprising an RNA-dependent DNA polymerase activity is a naturally-occurring reverse transcriptase from a retrovirus or a retrotransposon.

[0038] In another aspect, the disclosure provides a nucleic acid molecule encoding a modified pegRNA described above and provided in this disclosure.

[0039] In yet another aspect, the disclosure provides an expression vector comprising the above nucleic acid molecule. The nucleic acid molecule can be under the control of a promoter. The promoter can be a polIII promoter. The promoter can also be a U6, U6v4, U6v7, or U6v9 promoter or a fragment thereof, including a promoter having a nucleotide sequence of any of SEQ ID NOs: 3915-3918.

[0040] In yet another aspect, the disclosure provides cells (e.g., transformed cell lines) that comprise the modified pegRNA described above. The cells can also comprise the prime editing complexes described above (e.g., wherein the cell comprises both a modified pegRNA and a prime editor). The cells can also comprise any of the nucleic acid molecules described above, which express the modified pegRNA, and optionally which express the prime editors. In addition, the cells can comprise any of the expression vectors described above, which express the modified pegRNA, and optionally which express the prime editors.

[0041] In another aspect, the disclosure provides a pharmaceutical composition comprising: (i) a modified pegRNA described above, or a prime editing complex described above, a nucleic acid molecule described above, or an expression vector described above, or any of the cells described above, and (ii) a pharmaceutically acceptable excipient.

[0042] In yet another aspect, the disclosure provides a kit comprising: (i) a modified pegRNA described above, or a prime editing complex described above, a nucleic acid molecule described above, or an expression vector described above, or any of the cells described above, and (ii) a set of instructions for conducting prime editing.

[0043] In another aspect, the disclosure provides systems comprising (i) any of the pegRNAs or epegRNAs disclosed herein, and (ii) at least one prime editor comprising a napDNAbp and a DNA polymerase.

[0044] In another aspect, the disclosure provides a method of prime editing comprising contacting a target DNA sequence with a modified pegRNA described above and a prime editor comprising a napDNAbp and a domain having an RNA-dependent DNA polymerase activity, wherein the editing efficiency is increased as compared to the same method using a pegRNA not comprising the modification. In certain embodiments, the editing efficiency is increased by at least 1.5 fold. In other embodiments, the editing efficiency is increased by at least 2.0 fold. In still other embodiments, the editing efficiency is increased by at least 3.0 fold. In yet other embodiments, the editing efficiency is increased by at least 4, 5, 6, 7, 8, 9, or 10 fold.

[0045] In another aspect, the present disclosure uses a prime editor (e.g., PE1, PE2, or PE3) in combination with a guide RNA (pegRNA) to carry out prime editing to directly install or correct mutations in the CDKL5 gene which cause CDKL5 deficiency disorder. In various embodiments, the disclosure provides a complex comprising a prime editor (e.g., PE1, PE2, or PE3) and a pegRNA that is capable of directly installing or correcting more than one mutation in the CDKL5 gene in multiple subjects.

[0046] In the methods of prime editing disclosed herein, the napDNAbp can have a nickase activity. The napDNAbp can be a Cas9 protein or variant thereof. The napDNAbp can also be a nuclease active Cas9, a nuclease inactive Cas9 (dCas9), or a Cas9 nickase (nCas9). The napDNAbp can also be a Cas9, Cas12e, Cas12d, Cas12a, Cas12b1, Cas12b2, Cas13a, Cas12c, Cas12d, Cas12e, Cas12h, Cas12i, Cas12g, Cas12f (Cas14), Cas12f1, Cas12j (Cas(Φ), and Argonaute and optionally have a nickase activity.

[0047] In the methods of prime editing, the RNA-dependent DNA polymerase activity can be a reverse transcriptase comprising any one of the amino acid sequences of SEQ ID NOs: 32, 34, 36, 102-128, and 132. In other embodiments, the RNA-dependent DNA polymerase activity can be a reverse transcriptase comprising an amino acid sequence having at least 80%, 85%, 90%, 95%, 98%, or 99% sequence identity with the amino acid sequence of any one of SEQ ID NOs: 32, 34, 36, 102-128, and 132.

[0048] This Specification further refers to and incorporates by reference the following applications relating to prime editing, namely, U.S. Provisional Application No. 62/820,813, filed Mar. 19, 2019 (Attorney Docket No. B1195.70074US00), U.S. Provisional Application No. 62/858,958 (Attorney Docket No. B1195.70074US01), filed Jun. 7, 2019, U.S. Provisional Application No. 62/889,996 (Attorney Docket No. B1195.70074US02), filed Aug. 21, 2019, U.S. Provisional Application No. 62/922,654, filed Aug. 21, 2019 (Attorney Docket No. B1195.70083US00), U.S. Provisional Application No. 62/913,553 (Attorney Docket No. B1195.70074US03), filed Oct. 10, 2019, U.S. Provisional Application No. 62/973,558 (Attorney Docket No. B1195.70083US01), filed Oct. 10, 2019, U.S. Provisional Application No. 62/931,195 (Attorney Docket No. B1195.70074US04), filed Nov. 5, 2019, U.S. Provisional Application No. 62/944,231 (Attorney Docket No. B1195.70074US05), filed Dec. 5, 2019, U.S. Provisional Application No. 62/974,537 (Attorney Docket No. B1195.70083US02), filed Dec. 5, 2019, U.S. Provisional Application No. 62/991,069 (Attorney Docket No. B1195.70074US06), filed Mar. 17, 2020, and U.S. Provisional Application No. (63/100,548) (Attorney Docket No. B1195.70083US03), filed Mar. 17, 2020. In addition, this U.S. Provisional Application refers to and incorporates by reference International PCT Application Nos.: PCT/US20/23721; PCT/US20/23730; PCT/US20/23713; PCT/US20/23712; PCT/US20/23727; PCT/US20/23724; PCT/US20/23725; PCT/US20/23728; PCT/US20/23732; PCT/US20/23723; PCT/US20/23553; and PCT/US20/23583, each filed on Mar. 19, 2020.

[0049] It should be appreciated that the foregoing concepts, and additional concepts discussed below, may be arranged in any suitable combination, as the present disclosure is not limited in this respect. Further, other advantages and novel features of the present disclosure will become apparent from the following detailed description of various non-limiting embodiments when considered in conjunction with the accompanying figures.

### BRIEF DESCRIPTION OF THE DRAWINGS

[0050] The following drawings form part of the present specification and are included to further demonstrate certain aspects of the present disclosure, which can be better understood by reference to one or more of these drawings in combination with the detailed description of specific embodiments presented herein.

[0051] FIG. 1A provides a schematic of an exemplary process for introducing a nucleotide change, insertion, and/or deletion into a DNA molecule (e.g., a genome) using a fusion protein comprising a reverse transcriptase fused to a Cas9 protein (i.e., a prime editor) in complex with a pegRNA (i.e., a prime editor complex). In this embodiment, the guide RNA is extended at the 3′ end to include a DNA synthesis template sequence. The schematic shows how a polymerase (e.g., a reverse transcriptase (RT)) fused to a Cas9 nickase, in a complex with a pegRNA binds the DNA target site and nicks the PAM-containing DNA strand adjacent to the target nucleotide. The RT uses the nicked DNA as a primer for DNA synthesis from the gRNA, which is used as a template for the synthesis of a new DNA strand that encodes the desired edit (e.g., mutation, insertion, and/or deletion). The editing process shown may be referred to as “prime editing.”

[0052] FIG. 1B provides the same representation as in FIG. 1A, except that the prime editor complex is represented more generally as [napDNAbp]-[P]:pegRNA or [P]-[napDNAbp]:pegRNA, wherein “P” refers to any polymerase (e.g., a reverse transcriptase), “napDNAbp” refers to a nucleic acid programmable DNA binding protein (e.g., SpCas9), and “pegRNA” refers to a prime editing guide RNA, and “]-[” refers to an optional linker. As described elsewhere, e.g., FIGS. 3A-3G, the pegRNA comprises an 5′ extension arm comprising a primer binding site and a DNA synthesis template. Although not shown, it is contemplated that the extension arm of the pegRNA (i.e., which comprises a primer binding site and a DNA synthesis template) can be DNA or RNA. The particular polymerase contemplated in this configuration will depend upon the nature of the DNA synthesis template. For instance, if the DNA synthesis template is RNA, then the polymerase case be an RNA-dependent DNA polymerase (e.g., reverse transcriptase). If the DNA synthesis template is DNA, then the polymerase can be a DNA-dependent DNA polymerase.

[0053] FIG. 1C provides a schematic of an exemplary process for introducing a single nucleotide change, insertion, and/or deletion into a DNA molecule (e.g., a genome) using a fusion protein comprising a reverse transcriptase fused to a Cas9 protein in complex with a pegRNA. In this embodiment, the guide RNA is extended at the 5′ end to include a reverse transcriptase template sequence. The schematic shows how a reverse transcriptase (RT) fused to a Cas9 nickase, in a complex with a pegRNA binds the DNA target site and nicks the PAM-containing DNA strand adjacent to the target nucleotide. The RT uses the nicked DNA as a primer for DNA synthesis from the gRNA, which is used as a template for the synthesis of a new DNA strand that encodes the desired edit. The editing process shown may be referred to as “prime editing.”

[0054] FIG. 1D provides the same representation as in FIG. 1C, except that the prime editor complex is represented more generally as [napDNAbp]-[P]:pegRNA or [P]-[napDNAbp]:pegRNA, wherein “P” refers to any polymerase (e.g., a reverse transcriptase), “napDNAbp” refers to a nucleic acid programmable DNA binding protein (e.g., SpCas9), and “pegRNA” refers to a prime editing guide RNA, and “]-[” refers to an optional linker. As described elsewhere, e.g., FIGS. 3A-3G, the pegRNA comprises an 3′ extension arm comprising a primer binding site and a DNA synthesis template. Although not shown, it is contemplated that the extension arm of the pegRNA (i.e., which comprises a primer binding site and a DNA synthesis template) can be DNA or RNA. The particular polymerase contemplated in this configuration will depend upon the nature of the DNA synthesis template. For instance, if the DNA synthesis template is RNA, then the polymerase case be an RNA-dependent DNA polymerase (e.g., reverse transcriptase). If the DNA synthesis template is DNA, then the polymerase can be a DNA-dependent DNA polymerase. In various embodiments, the pegRNA can be engineered or synthesized to incorporate a DNA-based DNA synthesis template.

[0055] FIG. 1E is a schematic depicting an exemplary process of how the synthesized single strand of DNA (which comprises the desired nucleotide change) becomes resolved such that the desired nucleotide change is incorporated into the DNA. As shown, following synthesis of the edited strand (or “mutagenic strand”), equilibration with the endogenous strand, flap cleavage of the endogenous strand, and ligation leads to incorporation of the DNA edit after resolution of the mismatched DNA duplex through the action of endogenous DNA repair and/or replication processes.

[0056] FIG. 1F is a schematic showing that “opposite strand nicking” can be incorporated into the resolution method of FIG. 1E to help drive the formation of the desired product versus the reversion product. In opposite strand nicking, a second Cas9/gRNA complex is used to introduce a second nick on the opposite strand from the initial nicked strand. This induces the endogenous cellular DNA repair and/or replication processes to preferentially replace the unedited strand (i.e., the strand containing the second nick site).

[0057] FIG. 1G provides another schematic of an exemplary process for introducing a single nucleotide change, and/or insertion, and/or deletion into a DNA molecule (e.g., a genome) of a target locus using a nucleic acid programmable DNA binding protein (napDNAbp) complexed with a pegRNA. This process may be referred to as an embodiment of prime editing. The pegRNA comprises an extension at the 3′ or 5′ end of the guide RNA, or at an intramolecular location in the guide RNA. In step (a), the napDNAbp/gRNA complex contacts the DNA molecule, and the gRNA guides the napDNAbp to bind to the target locus. In step (b), a nick in one of the strands of DNA (the R-loop strand, or the PAM-containing strand, or the non-target DNA strand, or the protospacer strand) of the target locus is introduced (e.g., by a nuclease or chemical agent), thereby creating an available 3′ end in one of the strands of the target locus. In certain embodiments, the nick is created in the strand of DNA that corresponds to the R-loop strand, i.e., the strand that is not hybridized to the guide RNA sequence. In step (c), the 3′ end DNA strand interacts with the extended portion of the guide RNA in order to prime reverse transcription. In certain embodiments, the 3′ ended DNA strand hybridizes to a specific RT priming sequence on the extended portion of the guide RNA. In step (d), a reverse transcriptase is introduced which synthesizes a single strand of DNA from the 3′ end of the primed site towards the 3′ end of the guide RNA. This forms a single-strand DNA flap comprising the desired nucleotide change (e.g., the single base change, insertion, or deletion, or a combination thereof). In step (e), the napDNAbp and guide RNA are released. Steps (f) and (g) relate to the resolution of the single strand DNA flap such that the desired nucleotide change becomes incorporated into the target locus. This process can be driven towards the desired product formation by removing the corresponding 5′ endogenous DNA flap that forms once the 3′ single strand DNA flap invades and hybridizes to the complementary sequence on the other strand. The process can also be driven towards product formation with second strand nicking, as exemplified in FIG. 1F. This process may introduce at least one or more of the following genetic changes: transversions, transitions, deletions, and insertions.

[0058] FIG. 1H is a schematic depicting the types of genetic changes that are possible with the prime editing processes described herein. The types of nucleotide changes achievable by prime editing include deletions (including short and long deletions), single-nucleotide changes (including transitions and transversions), inversions, and insertions (including short and long deletions).

[0059] FIG. 1I is a schematic depicting temporal second strand nicking exemplified by PE3b (PE3b=PE2 prime editor+pegRNA+second strand nicking guide RNA). Temporal second strand nicking is a variant of second strand nicking in order to facilitate the formation of the desired edited product. The “temporal” term refers to the fact that the second-strand nick to the unedited strand occurs only after the desired edit is installed in the edited strand. This avoids concurrent nicks on both strands to lead to double-stranded DNA breaks.

[0060] FIG. 1J depicts a variation of prime editing contemplated herein that replaces the napDNAbp (e.g., SpCas9 nickase) with any programmable nuclease domain, such as zinc finger nucleases (ZFN) or transcription activator-like effector nucleases (TALEN). As such, it is contemplated that suitable nucleases do not necessarily need to be “programmed” by a nucleic acid targeting molecule (such as a guide RNA), but rather, may be programmed by defining the specificity of a DNA-binding domain, such as and in particular, a nuclease. Just as in prime editing with napDNAbp moieties, it is preferable that such alternative programmable nucleases be modified such that only one strand of a target DNA is cut. In other words, the programmable nucleases should function as nickases, preferably. Once a programmable nuclease is selected (e.g., a ZFN or a TALEN), then additional functionalities may be engineered into the system to allow it to operate in accordance with a prime editing-like mechanism. For example, the programmable nucleases may be modified by coupling (e.g., via a chemical linker) an RNA or DNA extension arm thereto, wherein the extension arm comprises a primer binding site (PBS) and a DNA synthesis template. The programmable nuclease may also be coupled (e.g., via a chemical or amino acid linker) to a polymerase, the nature of which will depend upon whether the extension arm is DNA or RNA. In the case of an RNA extension arm, the polymerase can be an RNA-dependent DNA polymerase (e.g., reverse transcriptase). In the case of a DNA extension arm, the polymerase can be a DNA-dependent DNA polymerase (e.g., a prokaryotic polymerase, including Pol I, Pol II, or Pol III, or a eukaryotic polymerase, including Pol a, Pol b, Pol g, Pol d, Pol e, or Pol z). The system may also include other functionalities added as fusions to the programmable nucleases, or added in trans to facilitate the reaction as a whole (e.g., (a) a helicase to unwind the DNA at the cut site to make the cut strand with the 3′ end available as a primer, (b) a flap endonuclease (e.g., FEN1) to help remove the endogenous strand on the cut strand to drive the reaction towards replacement of the endogenous strand with the synthesized strand, or (c) a nCas9:gRNA complex to create a second site nick on the opposite strand, which may help drive the integration of the synthesize repair through favored cellular repair of the non-edited strand). In an analogous manner to prime editing with a napDNAbp, such a complex with an otherwise programmable nuclease could be used to synthesize and then install a newly synthesized replacement strand of DNA carrying an edit of interest permanently into a target site of DNA.

[0061] FIG. 1K depicts, in one embodiment, the anatomical features of a target DNA that may be edited by prime editing. The target DNA comprises a “non-target strand” and a “target strand.” The target-strand is the strand that becomes annealed to the spacer of a pegRNA of a prime editor complex that recognizes the PAM site (in this case, NGG, which is recognized by the canonical SpCas9-based prime editors) The target strand may also be referred to as the “non-PAM strand” or the “non-edit strand.” By contrast, the non-target strand (i.e., the strand containing the protospacer and the PAM sequence of NGG) may be referred to as the “PAM-strand” or the “edit strand.” In various embodiments, the nick site of the PE complex will be in the protospacer on the PAM-strand (e.g., with the SpCas9-based PE). The location of the nick will be characteristic of the particular Cas9 that forms the PE. For example, with an SpCas9-based PE, the nick site in the phosphodiester bond between bases three (“−3” position relative to the position 1 of the PAM sequence) and four (“−4” position relative to position 1 of the PAM sequence). The nick site in the protospacer forms a free 3′ hydroxyl group, which as seen in the following figures, complexes with the primer binding site of the extension arm of the pegRNA and provides the substrate to begin polymerization of a single strand of DNA code for by the DNA synthesis template of the extension arm of the pegRNA. This polymerization reaction is catalyzed by the polymerase (e.g., reverse transcriptase) of the prime editor in the 5′ to 3′ direction. Polymerization terminates before reaching the gRNA core (e.g., by inclusion of a polymerization termination signal, or secondary structure, which functions to terminate the polymerization activity of PE), producing a single strand DNA flap that is extended from the original 3′ hydroxyl group of the nicked PAM strand. The DNA synthesis template codes for a single strand DNA that is homologous to the endogenous 5′-ended single strand of DNA that immediately follows the nick site on the PAM strand and incorporates the desired nucleotide change (e.g., single base substitution, insertion, deletion, inversion). The position of the desired edit can be in any position following downstream of the nick site on the PAM strand, which can include position +1, +2, +3, +4 (the start of the PAM site), +5 (position 2 of the PAM site), +6 (position 3 of the PAM site), +7, +8, +9, +10, +11, +12, +13, +14, +15, +16, +17, +18, +19, +20, +21, +22, +23, +24, +25, +26, +27, +28, +29, +30, +31, +32, +33, +34, +35, +36, +37, +38, +39, +40, +41, +42, +43, +44, +45, +46, +47, +48, +49, +50, +51, +52, +53, +54, +55, +56, +57, +58, +59, +60, +61, +62, +63, +64, +65, +66, +67, +68, +69, +70, +71, +72, +73, +74, +75, +76, +77, +78, +79, +80, +81, +82, +83, +84, +85, +86, +87, +88, +89, +90, +91, +92, +93, +94, +95, +96, +97, +98, +99, +100, +101, +102, +103, +104, +105, +106, +107, +108, +109, +110, +111, +112, +113, +114, +115, +116, +117, +118, +119, +120, +121, +122, +123, +124, +125, +126, +127, +128, +129, +130, +131, +132, +133, +134, +135, +136, +137, +138, +139, +140, +141, +142, +143, +144, +145, +146, +147, +148, +149, or +150, or more (relative to the downstream position of the nick site). Once the 3′end single stranded DNA (containing the edit of interest) replaces the endogenous 5′ end single stranded DNA, the DNA repair and replication processes will result in permanent installation of the edit on the PAM strand, and then correction of the mismatch on the non-PAM strand that will exist at the target site. In this way, the edit will extend to both strands of DNA on the target DNA site. It will be appreciated that reference to “edited strand” and “non-edited” strand only intends to delineate the strands of DNA involved in the PE mechanism. The “edited strand” is the strand that first becomes edited by replacement of the 5′ ended single strand DNA immediately downstream of the nick site with the synthesized 3′ ended single stranded DNA containing the desired edit. The “non-edited” strand is the strand pair with the edited strand, but which itself also becomes edited through repair and/or replication to be complementary to the edited strand, and in particular, the edit of interest.

[0062] FIG. 1L depicts the mechanism of prime editing showing the anatomical features of the target DNA, prime editor complex, and the interaction between the pegRNA and the target DNA. First, a prime editor comprising a fusion protein having a polymerase (e.g., reverse transcriptase) and a napDNAbp (e.g., SpCas9 nickase, e.g., a SpCas9 having a deactivating mutation in an HNH nuclease domain (e.g., H840A) or a deactivating mutation in a RuvC nuclease domain (D10A)) is complexed with a pegRNA and DNA having a target DNA to be edited. The pegRNA comprises a spacer, gRNA core (aka gRNA scaffold or gRNA backbone) (which binds to the napDNAbp), and an extension arm. The extension arm can be at the 3′ end, the 5′ end, or somewhere within the pegRNA molecule. As shown, the extension arm is at the 3′ end of the pegRNA. The extension arm comprises in the 3′ to 5′ direction a primer binding site and a DNA synthesis template (comprising both an edit of interest and regions of homology (i.e., homology arms) that are homologous with the 5′ ended single stranded DNA immediately following the nick site on the PAM strand. As shown, once the nick is introduced thereby producing a free 3′ hydroxyl group immediately upstream of the nick site, the region immediately upstream of the nick site on the PAM strand anneals to a complementary sequence at the 3′ end of the extension arm referred to as the “primer binding site,” creating a short double-stranded region with an available 3′ hydroxyl end, which forms a substrate for the polymerase of the prime editor complex. The polymerase (e.g., reverse transcriptase) then polymerase as strand of DNA from the 3′ hydroxyl end to the end of the extension arm. The sequence of the single stranded DNA is coded for by the DNA synthesis template, which is the portion of the extension arm (i.e., excluding the primer binding site) that is “read” by the polymerase to synthesize new DNA. This polymerization effectively extends the sequence of the original 3′ hydroxyl end of the initial nick site. The DNA synthesis template encodes a single strand of DNA that comprises not only the desired edit, but also regions that are homologous to the endogenous single strand of DNA immediately downstream of the nick site on the PAM strand. Next, the encoded 3′ ended single strand of DNA (i.e., the 3′ single strand DNA flap) displaces the corresponding homologous endogenous 5′-ended single strand of DNA immediately downstream of the nick site on the PAM strand, forming a DNA intermediate having a 5′-ended single strand DNA flap, which is removed by the cell (e.g., by a flap endonuclease). The 3′-ended single strand DNA flap, which anneals to the complement of the endogenous 5′-ended single strand DNA flap, is ligated to the endogenous strand after the 5′ DNA flap is removed. The desired edit in the 3′ ended single strand DNA flap, now annealed and ligate, forms a mismatch with the complement strand, which undergoes DNA repair and/or a round of replication, thereby permanently installing the desired edit on both strands.

[0063] FIG. 2 shows three Cas complexes (SpCas9, SaCas9, and LbCas12a) that can be used in the herein described prime editors and their PAM, gRNA, and DNA cleavage features. The figure shows designs for complexes involving SpCas9, SaCas9, and LbCas12a.

[0064] FIGS. 3A-3F show designs for engineered 5′ prime editor gRNA (FIG. 3A), 3′ prime editor gRNA (FIG. 3B), and an intramolecular extension (FIG. 3C). The pegRNA may also be referred to herein as pegRNA or “prime editing guide RNA.” FIG. 3D and FIG. 3E provide additional embodiments of 3′ and 5′ prime editor gRNAs (pegRNAs), respectively. FIG. 3F illustrates the interaction between a 3′ end prime editor guide RNA with a target DNA sequence. The embodiments of FIGS. 3A-3C depict exemplary arrangements of the reverse transcription template sequence (i.e., or more broadly referred to as a DNA synthesis template, as indicated, since the RT is only one type of polymerase that may be used in the context of prime editors), the primer binding site, and an optional linker sequence in the extended portions of the 3′, 5′, and intramolecular versions, as well as the general arrangements of the spacer and core regions. The disclosed prime editing process is not limited to these configurations of pegRNAs. The embodiment of FIG. 3D provides the structure of an exemplary pegRNA contemplated herein. The pegRNA comprises three main component elements ordered in the 5′ to 3′ direction, namely: a spacer, a gRNA core, and an extension arm at the 3′ end. The extension arm may further be divided into the following structural elements in the 5′ to 3′ direction, namely: a optional homology arm, a DNA synthesis template, and a primer binding site (PBS). In addition, the pegRNA may comprise an optional 3′ end modifier region (e1) and an optional 5′ end modifier region (e2). Still further, the pegRNA may comprise a transcriptional termination signal at the 3′ end of the pegRNA (not depicted). These structural elements are further defined herein. The depiction of the structure of the pegRNA is not meant to be limiting and embraces variations in the arrangement of the elements. For example, the optional sequence modifiers (e1) and (e2) could be positioned within or between any of the other regions shown, and not limited to being located at the 3′ and 5′ ends. The pegRNA could comprise, in certain embodiments, secondary RNA structure, such as, but not limited to, hairpins, stem/loops, toe loops, RNA-binding protein recruitment domains (e.g., the MS2 aptamer which recruits and binds to the MS2cp protein). For instance, such secondary structures could be position within the spacer, the gRNA core, or the extension arm, and in particular, within the e1 and/or e2 modifier regions. In addition to secondary RNA structures, the pegRNAs could comprise (e.g., within the e1 and/or e2 modifier regions) a chemical linker or a poly(N) linker or tail, where “N” can be any nucleobase. In some embodiments (e.g., as shown in FIG. 72(c)), the chemical linker may function to prevent reverse transcription of the sgRNA scaffold or core. In addition, in certain embodiments (e.g., see FIG. 72(c)), the extension arm (3) could be comprised of RNA or DNA, and/or could include one or more nucleobase analogs (e.g., which might add functionality, such as temperature resilience). Still further, the orientation of the extension arm (3) can be in the natural 5′-to-3′ direction, or synthesized in the opposite orientation in the 3′-to-5′ direction (relative to the orientation of the pegRNA molecule overall). It is also noted that one of ordinary skill in the art will be able to select an appropriate DNA polymerase, depending on the nature of the nucleic acid materials of the extension arm (i.e., DNA or RNA), for use in prime editing that may be implemented either as a fusion with the napDNAbp or as provided in trans as a separate moiety to synthesize the desired template-encoded 3′ single-strand DNA flap that includes the desired edit. For example, if the extension arm is RNA, then the DNA polymerase could be a reverse transcriptase or any other suitable RNA-dependent DNA polymerase. However, if the extension arm is DNA, then the DNA polymerase could be a DNA-dependent DNA polymerase. In various embodiments, provision of the DNA polymerase could be in trans, e.g., through the use of an RNA-protein recruitment domain (e.g., an MS2 hairpin installed on the pegRNA (e.g., in the e1 or e2 region, or elsewhere and an MS2cp protein fused to the DNA polymerase, thereby co-localizing the DNA polymerase to the pegRNA). It is also noted that the primer binding site does not generally form a part of the template that is used by the DNA polymerase (e.g., reverse transcriptase) to encode the resulting 3′ single-strand DNA flap that includes the desired edit. Thus, the designation of the “DNA synthesis template” refers to the region or portion of the extension arm (3) that is used as a template by the DNA polymerase to encode the desired 3′ single-strand DNA flap containing the edit and regions of homology to the 5′ endogenous single strand DNA flap that is replaced by the 3′ single strand DNA strand product of prime editing DNA synthesis. In some embodiments, the DNA synthesis template includes the “edit template” and the “homology arm”, or one or more homology arms, e.g., before and after the edit template. The edit template can be as small as a single nucleotide substitution, or it may be an insertion, or an inversion of DNA. In addition, the edit template may also include a deletion, which can be engineered by encoding homology arm that contains a desired deletion. In other embodiments, the DNA synthesis template may also include the e2 region or a portion thereof. For instance, if the e2 region comprises a secondary structure that causes termination of DNA polymerase activity, then it is possible that DNA polymerase function will be terminated before any portion of the e2 region is actual encoded into DNA. It is also possible that some or even all of the e2 region will be encoded into DNA. How much of e2 is actually used as a template will depend on its constitution and whether that constitution interrupts DNA polymerase function.

[0065] The embodiment of FIG. 3E provides the structure of another pegRNA contemplated herein. The pegRNA comprises three main component elements ordered in the 5′ to 3′ direction, namely: a spacer, a gRNA core, and an extension arm at the 3′ end. The extension arm may further be divided into the following structural elements in the 5′ to 3′ direction, namely: a optional homology arm, a DNA synthesis template, and a primer binding site (PBS). In addition, the pegRNA may comprise an optional 3′ end modifier region (e1) and an optional 5′ end modifier region (e2). Still further, the pegRNA may comprise a transcriptional termination signal on the 3′ end of the pegRNA (not depicted). These structural elements are further defined herein. The depiction of the structure of the pegRNA is not meant to be limiting and embraces variations in the arrangement of the elements. For example, the optional sequence modifiers (e1) and (e2) could be positioned within or between any of the other regions shown, and not limited to being located at the 3′ and 5′ ends. The pegRNA could comprise, in certain embodiments, secondary RNA structures, such as, but not limited to, hairpins, stem/loops, toe loops, RNA-binding protein recruitment domains (e.g., the MS2 aptamer which recruits and binds to the MS2cp protein). These secondary structures could be positioned anywhere in the pegRNA molecule. For instance, such secondary structures could be position within the spacer, the gRNA core, or the extension arm, and in particular, within the e1 and/or e2 modifier regions. In addition to secondary RNA structures, the pegRNAs could comprise (e.g., within the e1 and/or e2 modifier regions) a chemical linker or a poly(N) linker or tail, where “N” can be any nucleobase. In some embodiments (e.g., as shown in FIG. 72(c)), the chemical linker may function to prevent reverse transcription of the sgRNA scaffold or core. In addition, in certain embodiments (e.g., see FIG. 72(c)), the extension arm (3) could be comprised of RNA or DNA, and/or could include one or more nucleobase analogs (e.g., which might add functionality, such as temperature resilience). Still further, the orientation of the extension arm (3) can be in the natural 5′-to-3′ direction, or synthesized in the opposite orientation in the 3′-to-5′ direction (relative to the orientation of the pegRNA molecule overall). It is also noted that one of ordinary skill in the art will be able to select an appropriate DNA polymerase, depending on the nature of the nucleic acid materials of the extension arm (i.e., DNA or RNA), for use in prime editing that may be implemented either as a fusion with the napDNAbp or as provided in trans as a separate moiety to synthesize the desired template-encoded 3′ single-strand DNA flap that includes the desired edit. For example, if the extension arm is RNA, then the DNA polymerase could be a reverse transcriptase or any other suitable RNA-dependent DNA polymerase. However, if the extension arm is DNA, then the DNA polymerase could be a DNA-dependent DNA polymerase. In various embodiments, provision of the DNA polymerase could be in trans, e.g., through the use of an RNA-protein recruitment domain (e.g., an MS2 hairpin installed on the pegRNA (e.g., in the e1 or e2 region, or elsewhere and an MS2cp protein fused to the DNA polymerase, thereby co-localizing the DNA polymerase to the pegRNA). It is also noted that the primer binding site does not generally form a part of the template that is used by the DNA polymerase (e.g., reverse transcriptase) to encode the resulting 3′ single-strand DNA flap that includes the desired edit. Thus, the designation of the “DNA synthesis template” refers to the region or portion of the extension arm (3) that is used as a template by the DNA polymerase to encode the desired 3′ single-strand DNA flap containing the edit and regions of homology to the 5′ endogenous single strand DNA flap that is replaced by the 3′ single strand DNA strand product of prime editing DNA synthesis. In some embodiments, the DNA synthesis template includes the “edit template” and the “homology arm”, or one or more homology arms, e.g., before and after the edit template. The edit template can be as small as a single nucleotide substitution, or it may be an insertion, or an inversion of DNA. In addition, the edit template may also include a deletion, which can be engineered by encoding homology arm that contains a desired deletion. In other embodiments, the DNA synthesis template may also include the e2 region or a portion thereof. For instance, if the e2 region comprises a secondary structure that causes termination of DNA polymerase activity, then it is possible that DNA polymerase function will be terminated before any portion of the e2 region is actual encoded into DNA. It is also possible that some or even all of the e2 region will be encoded into DNA. How much of e2 is actually used as a template will depend on its constitution and whether that constitution interrupts DNA polymerase function.

[0066] The schematic of FIG. 3F depicts the interaction of a typical pegRNA with a target site of a double stranded DNA and the concomitant production of a 3′ single stranded DNA flap containing the genetic change of interest. The double strand DNA is shown with the top strand (i.e., the target strand) in the 3′ to 5′ orientation and the lower strand (i.e., the PAM strand or non-target strand) in the 5′ to 3′ direction. The top strand comprises the complement of the “protospacer” and the complement of the PAM sequence and is referred to as the “target strand” because it is the strand that is target by and anneals to the spacer of the pegRNA. The complementary lower strand is referred to as the “non-target strand” or the “PAM strand” or the “protospacer strand” since it contains the PAM sequence (e.g., NGG) and the protospacer. Although not shown, the pegRNA depicted would be complexed with a Cas9 or equivalent domain of a prime editor. As shown in the schematic (FIG. 3F), the spacer sequence of the pegRNA anneals to the complementary region of the protospacer on the target strand. This interaction forms as DNA/RNA hybrid between the spacer RNA and the complement of the protospacer DNA, and induces the formation of an R loop in the protospacer. As taught elsewhere herein, the Cas9 protein (not shown) then induces a nick in the non-target strand, as shown. This then leads to the formation of the 3′ ssDNA flap region immediately upstream of the nick site which, in accordance with *z*, interacts with the 3′ end of the pegRNA at the primer binding site. The 3′ end of the ssDNA flap (i.e., the reverse transcriptase primer sequence) anneals to the primer binding site (A) on the pegRNA, thereby priming reverse transcriptase. Next, reverse transcriptase (e.g., provided in trans or provided cis as a fusion protein, attached to the Cas9 construct) then polymerizes a single strand of DNA which is coded for by the DNA synthesis template (including the edit template (B) and homology arm (C)). The polymerization continues towards the 5′ end of the extension arm. The polymerized strand of ssDNA forms a ssDNA 3′ end flap which, as describe elsewhere (e.g., as shown in FIG. 1G), invades the endogenous DNA, displacing the corresponding endogenous strand (which is removed as a 5′ ended DNA flap of endogenous DNA), and installing the desired nucleotide edit (single nucleotide base pair change, deletions, insertions (including whole genes) through DNA repair/replication rounds.

[0067] FIG. 3G depicts yet another embodiment of prime editing contemplated herein. In particular, the top schematic depicts one embodiment of a prime editor (PE), which comprises a fusion protein of a napDNAbp (e.g., SpCas9) and a polymerase (e.g., a reverse transcriptase), which are joined by a linker. The PE forms a complex with a pegRNA by binding to the gRNA core of the pegRNA. In the embodiment shown, the pegRNA is equipped with a 3′ extension arm that comprises, beginning at the 3′ end, a primer binding site (PBS) followed by a DNA synthesis template. The bottom schematic depicts a variant of a prime editor, referred to as a “trans prime editor (tPE).” In this embodiment, the DNA synthesis template and PBS are decoupled from the pegRNA and presented on a separate molecule, referred to as a trans prime editor RNA template (“tPERT”), which comprises an RNA-protein recruitment domain (e.g., a MS2 hairpin). The PE itself is further modified to comprise a fusion to a rPERT recruiting protein (“RP”), which is a protein which specifically recognizes and binds to the RNA-protein recruitment domain. In the example where the RNA-protein recruitment domain is an MS2 hairpin, the corresponding rPERT recruiting protein can be MS2cp of the MS2 tagging system. The MS2 tagging system is based on the natural interaction of the MS2 bacteriophage coat protein (“MCP” or “MS2cp”) with a stem-loop or hairpin structure present in the genome of the phage, i.e., the “MS2 hairpin” or “MS2 aptamer.” In the case of trans prime editing, the RP-PE:gRNA complex “recruits” a tPERT having the appropriate RNA-protein recruitment domain to co-localize with the PE:gRNA complex, thereby providing the PBS and DNA synthesis template in trans for use in prime editing, as shown in the example depicted in FIG. 3H.

[0068] FIG. 3H depicts the process of trans prime editing. In this embodiment, the trans prime editor comprises a “PE2” prime editor (i.e., a fusion of a Cas9(H840A) and a variant MMLV RT) fused to an MS2cp protein (i.e., a type of recruiting protein that recognizes and binds to an MS2 aptamer) and which is complexed with an sgRNA (i.e., a standard guide RNA as opposed to a pegRNA). The trans prime editor binds to the target DNA and nicks the nontarget strand. The MS2cp protein recruits a tPERT in trans through the specific interaction with the RNA-protein recruitment domain on the tPERT molecule. The tPERT becomes co-localized with the trans prime editor, thereby providing the PBS and DNA synthesis template functions in trans for use by the reverse transcriptase polymerase to synthesize a single strand DNA flap having a 3′ end and containing the desired genetic information encoded by the DNA synthesis template.

[0069] FIGS. 4A-4E demonstrate in vitro prime editing assays. FIG. 4A is a schematic of fluorescently labeled DNA substrates gRNA templated extension by an RT enzyme, PAGE. FIG. 4B shows prime editing with pre-nicked substrates, dCas9, and 5′-extended pegRNAs of differing synthesis template length. FIG. 4C shows the RT reaction with pre-nicked DNA substrates in the absence of Cas9. FIG. 4D shows prime editing on full dsDNA substrates with Cas9(H840A) and 5′-extended pegRNAs. FIG. 4E shows a 3′-extended pegRNAs template with pre-nicked and full dsDNA substrates. All reactions are with M-MLV RT.

[0070] FIG. 5 shows in vitro validations using 5′-extended pegRNAs with varying length synthesis templates. Fluorescently labeled (Cy5) DNA targets were used as substrates, and were pre-nicked in this set of experiments. The Cas9 used in these experiments is catalytically dead Cas9 (dCas9), and the RT used is Superscript III, a commercial RT derived from the Moloney-Murine Leukemia Virus (M-MLV). dCas9:gRNA complexes were formed from purified components. Then, the fluorescently labeled DNA substrate was added along with dNTPs and the RT enzyme. After 1 hour of incubation at 37° C., the reaction products were analyzed by denaturing urea-polyacrylamide gel electrophoresis (PAGE). The gel image shows extension of the original DNA strand to lengths that are consistent with the length of the reverse transcription template.

[0071] FIG. 6 shows in vitro validations using 5′-pegRNAs with varying length synthesis templates, which closely parallels those shown in FIG. 5. However, the DNA substrates are not pre-nicked in this set of experiments. The Cas9 used in these experiments is a Cas9 nickase (SpyCas9 H840A mutant) and the RT used is Superscript III, a commercial RT derived from the Moloney-Murine Leukemia Virus (M-MLV). The reaction products were analyzed by denaturing urea-polyacrylamide gel electrophoresis (PAGE). As shown in the gel, the nickase efficiently cleaves the DNA strand when the standard gRNA is used (gRNA_0, lane 3).

[0072] FIG. 7 demonstrates that 3′ extensions support DNA synthesis and do not significantly affect Cas9 nickase activity. Pre-nicked substrates (black arrow) are near-quantitatively converted to RT products when either dCas9 or Cas9 nickase is used (lanes 4 and 5). Greater than 50% conversion to the RT product (red arrow) is observed with full substrates (lane 3). Cas9 nickase (SpyCas9 H840A mutant), catalytically dead Cas9 (dCas9) and Superscript III, a commercial RT derived from the Moloney-Murine Leukemia Virus (M-MLV) are used.

[0073] FIG. 8 demonstrates dual color experiments that were used to determine if the RT reaction preferentially occurs with the gRNA in cis (bound in the same complex). Two separate experiments were conducted for 5′-extended and 3′-extended pegRNAs. Products were analyzed by PAGE. Product ratio calculated as (Cy3cis/Cy3trans)/(Cy5trans/Cy5cis).

[0074] FIGS. 9A-9D demonstrates a flap model substrate. FIG. 9A shows a dual-FP reporter for flap-directed mutagenesis. FIG. 9B shows stop codon repair in HEK cells. FIG. 9C shows sequenced yeast clones after flap repair. FIG. 9D shows testing of different flap features in human cells.

[0075] FIG. 10 demonstrates prime editing on plasmid substrates. A dual-fluorescent reporter plasmid was constructed for yeast (S. cerevisiae) expression. Expression of this construct in yeast produces only GFP. The in vitro prime editing reaction introduces a point mutation, and transforms the parent plasmid or an in vitro Cas9(H840A) nicked plasmid into yeast. The colonies are visualized by fluorescence imaging. Yeast dual-FP plasmid transformants are shown. Transforming the parent plasmid or an in vitro Cas9(H840A) nicked plasmid results in only green GFP expressing colonies. The prime editing reaction with 5′-extended or 3′-extended pegRNAs produces a mix of green and yellow colonies. The latter express both GFP and mCherry. More yellow colonies are observed with the 3′-extended pegRNA. A positive control that contains no stop codon is shown as well.

[0076] FIG. 11 shows prime editing on plasmid substrates similar to the experiment in FIG. 10, but instead of installing a point mutation in the stop codon, prime editing installs a single nucleotide insertion (left) or deletion (right) that repairs a frameshift mutation and allows for synthesis of downstream mCherry. Both experiments used 3′ extended pegRNAs.

[0077] FIG. 12 shows editing products of prime editing on plasmid substrates, characterized by Sanger sequencing. Individually colonies from the TRT transformations were selected and analyzed by Sanger sequencing. Precise edits were observed by sequencing select colonies. Green colonies contained plasmids with the original DNA sequence, while yellow colonies contained the precise mutation designed by the prime editing gRNA. No other point mutations or indels were observed.

[0078] FIG. 13 shows the potential scope for the new prime editing technology is shown and compared to deaminase-mediated base editor technologies.

[0079] FIG. 14 shows a schematic of editing in human cells.

[0080] FIG. 15 demonstrates the extension of the primer binding site in gRNA.

[0081] FIG. 16 shows truncated gRNAs for adjacent targeting.

[0082] FIGS. 17A-17C are graphs displaying the % T to A conversion at the target nucleotide after transfection of components in human embryonic kidney (HEK) cells. FIG. 17A shows data, which presents results using an N-terminal fusion of wild type MLV reverse transcriptase to Cas9(H840A) nickase (32-amino acid linker). FIG. 17B is similar to FIG. 17A, but for C-terminal fusion of the RT enzyme. FIG. 17C is similar to FIG. 17A but the linker between the MLV RT and Cas9 is 60 amino acids long instead of 32 amino acids.

[0083] FIG. 18 shows high purity T to A editing at HEK3 site by high-throughput amplicon sequencing. The output of sequencing analysis displays the most abundant genotypes of edited cells.

[0084] FIG. 19 shows editing efficiency at the target nucleotide (blue bars) alongside indel rates (orange bars). WT refers to the wild type MLV RT enzyme. The mutant enzymes (M1 through M4) contain the mutations listed to the right. Editing rates were quantified by high throughput sequencing of genomic DNA amplicons.

[0085] FIG. 20 shows editing efficiency of the target nucleotide when a single strand nick is introduced in the complementary DNA strand in proximity to the target nucleotide. Nicking at various distances from the target nucleotide was tested (triangles). Editing efficiency at the target base pair (blue bars) is shown alongside the indel formation rate (orange bars). The “none” example does not contain a complementary strand nicking guide RNA. Editing rates were quantified by high throughput sequencing of genomic DNA amplicons.

[0086] FIG. 21 demonstrates processed high throughput sequencing data showing the desired T to A transversion mutation and general absence of other major genome editing byproducts.

[0087] FIG. 22 provides a schematic of an exemplary process for conducting targeted mutagenesis with an error-prone reverse transcriptase on a target locus using a nucleic acid programmable DNA binding protein (napDNAbp) complexed with an pegRNA, i.e., prime editing with an error-prone RT. This process may be referred to as an embodiment of prime editing for targeted mutagenesis. The pegRNA comprises an extension at the 3′ or 5′ end of the guide RNA, or at an intramolecular location in the guide RNA. In step (a), the napDNAbp/gRNA complex contacts the DNA molecule and the gRNA guides the napDNAbp to bind to the target locus to be mutagenized. In step (b), a nick in one of the strands of DNA of the target locus is introduced (e.g., by a nuclease or chemical agent), thereby creating an available 3′ end in one of the strands of the target locus. In certain embodiments, the nick is created in the strand of DNA that corresponds to the R-loop strand, i.e., the strand that is not hybridized to the guide RNA sequence. In step (c), the 3′ end DNA strand interacts with the extended portion of the guide RNA in order to prime reverse transcription. In certain embodiments, the 3′ ended DNA strand hybridizes to a specific RT priming sequence on the extended portion of the guide RNA. In step (d), an error-prone reverse transcriptase is introduced which synthesizes a mutagenized single strand of DNA from the 3′ end of the primed site towards the 3′ end of the guide RNA. Exemplary mutations are indicated with an asterisk “*”. This forms a single-strand DNA flap comprising the desired mutagenized region. In step (e), the napDNAbp and guide RNA are released. Steps (f) and (g) relate to the resolution of the single strand DNA flap (comprising the mutagenized region) such that the desired mutagenized region becomes incorporated into the target locus. This process can be driven towards the desired product formation by removing the corresponding 5′ endogenous DNA flap that forms once the 3′ single strand DNA flap invades and hybridizes to the complementary sequence on the other strand. The process can also be driven towards product formation with second strand nicking, as exemplified in FIG. 1F. Following endogenous DNA repair and/or replication processes, the mutagenized region becomes incorporated into both strands of DNA of the DNA locus.

[0088] FIG. 23 is a schematic of gRNA design for contracting trinucleotide repeat sequences and trinucleotide repeat contraction with prime editing. Trinucleotide repeat expansion is associated with a number of human diseases, including Huntington's disease, Fragile X syndrome, and Friedreich's ataxia. The most common trinucleotide repeat contains CAG triplets, though GAA triplets (Friedreich's ataxia) and CGG triplets (Fragile X syndrome) also occur. Inheriting a predisposition to expansion, or acquiring an already expanded parental allele, increases the likelihood of acquiring the disease. Pathogenic expansions of trinucleotide repeats could hypothetically be corrected using prime editing. A region upstream of the repeat region can be nicked by an RNA-guided nuclease, then used to prime synthesis of a new DNA strand that contains a healthy number of repeats (which depends on the particular gene and disease). After the repeat sequence, a short stretch of homology is added that matches the identity of the sequence adjacent to the other end of the repeat (red strand). Invasion of the newly synthesized strand, and subsequent replacement of the endogenous DNA with the newly synthesized flap, leads to a contracted repeat allele.

[0089] FIG. 24 is a schematic showing precise 10-nucleotide deletion with prime editing. A guide RNA targeting the HEK3 locus was designed with a reverse transcription template that encodes a 10-nucleotide deletion after the nick site. Editing efficiency in transfected HEK cells was assessed using amplicon sequencing.

[0090] FIG. 25 is a schematic showing gRNA design for peptide tagging genes at endogenous genomic loci and peptide tagging with prime editing. The FlAsH and ReAsH tagging systems comprise two parts: (1) a fluorophore-biarsenical probe, and (2) a genetically encoded peptide containing a tetracysteine motif, exemplified by the sequence FLNCCPGCCMEP (SEQ ID NO: 1). When expressed within cells, proteins containing the tetracysteine motif can be fluorescently labeled with fluorophore-arsenic probes (see ref: J. Am. Chem. Soc., 2002, 124 (21), pp 6063-6076. DOI: 10.1021/ja017687n). The “sortagging” system employs bacterial sortase enzymes that covalently conjugate labeled peptide probes to proteins containing suitable peptide substrates (see ref: Nat. Chem. Biol. 2007 November; 3(11):707-8. DOI: 10.1038/nchembio.2007.31). The FLAG-tag (DYKDDDDK (SEQ ID NO: 2)), V5-tag (GKPIPNPLLGLDST (SEQ ID NO: 3)), GCN4-tag (EELLSKNYHLENEVARLKK (SEQ ID NO: 4)), HA-tag (YPYDVPDYA (SEQ ID NO: 5)), and Myc-tag (EQKLISEEDL (SEQ ID NO: 6)) are commonly employed as epitope tags for immunoassays. The pi-clamp encodes a peptide sequence (FCPF (SEQ ID NO: 7)) that can by labeled with a pentafluoro-aromatic substrates (ref: Nat. Chem. 2016 February; 8(2):120-8. doi: 10.1038/nchem.2413).

[0091] FIG. 26A shows precise installation of a His6-tag and a FLAG-tag into genomic DNA. A guide RNA targeting the HEK3 locus was designed with a reverse transcription template that encodes either an 18-nt His-tag insertion or a 24-nt FLAG-tag insertion. Editing efficiency in transfected HEK cells was assessed using amplicon sequencing. Note that the full 24-nt sequence of the FLAG-tag is outside of the viewing frame (sequencing confirmed full and precise insertion). FIG. 26B shows a schematic outlining various applications involving protein/peptide tagging, including (a) rendering proteins soluble or insoluble, (b) changing or tracking the cellular localization of a protein, (c) extending the half-life of a protein, (d) facilitating protein purification, and (e) facilitating the detection of proteins.

[0092] FIG. 27 shows an overview of prime editing by installing a protective mutation in PRNP that prevents or halts the progression of prion disease. The pegRNA sequences correspond to residues 1-20 of SEQ ID NO: 810 on the left (i.e., 5′ of the sgRNA scaffold) and residues 21-43 of SEQ ID NO 810 on the right (i.e., 3′ of the sgRNA scaffold).

[0093] FIG. 28A is a schematic of PE-based insertion of sequences encoding RNA motifs. FIG. 28B is a list (not exhaustive) of some example motifs that could potentially be inserted, and their functions.

[0094] FIG. 29A is a depiction of a prime editor. FIG. 29B shows possible modifications to genomic, plasmid, or viral DNA directed by a PE. FIG. 29C shows an example scheme for insertion of a library of peptide loops into a specified protein (in this case GFP) via a library of pegRNAs. FIG. 29D shows an example of possible programmable deletions of codons or N-, or C-terminal truncations of a protein using different pegRNAs. Deletions would be predicted to occur with minimal generation of frameshift mutations.

[0095] FIG. 30 shows a possible scheme for iterative insertion of codons in a continual evolution system, such as PACE.

[0096] FIG. 31 is an illustration of an engineered gRNA showing the gRNA core, ˜20 nt spacer matching the sequence of the targeted gene, the reverse transcription template with immunogenic epitope nucleotide sequence and the primer binding site matching the sequence of the targeted gene.

[0097] FIG. 32 is a schematic showing using prime editing as a means to insert known immunogenicity epitopes into endogenous or foreign genomic DNA, resulting in modification of the corresponding proteins.

[0098] FIG. 33 is a schematic showing pegRNA design for primer binding sequence insertions and primer binding insertion into genomic DNA using prime editing for determining off-target editing. In this embodiment, prime editing is conducted inside a living cell, a tissue, or an animal model. As a first step, an appropriate pegRNA is designed. The top schematic shows an exemplary pegRNA that may be used in this aspect. The spacer sequence in the pegRNA (labeled “protospacer”) is complementary to one of the strands of the genomic target. The PE:pegRNA complex (i.e., the PE complex) installs a single stranded 3′ end flap at the nick site which contains the encoded primer binding sequence and the region of homology (coded by the homology arm of the pegRNA) that is complementary to the region just downstream of the cut site (in red). Through flap invasion and DNA repair/replication processes, the synthesized strand becomes incorporated into the DNA, thereby installing the primer binding site. This process can occur at the desired genomic target, but also at other genomic sites that might interact with the pegRNA in an off-target manner (i.e., the pegRNA guides the PE complex to other off-target sites due to the complementarity of the spacer region to other genomic sites that are not the intended genomic site). Thus, the primer binding sequence may be installed not only at the desired genomic target, but at off-target genomic sites elsewhere in the genome. In order to detect the insertion of these primer binding sites at both the intended genomic target sites and the off-target genomic sites, the genomic DNA (post-PE) can be isolated, fragmented, and ligated to adapter nucleotides (shown in red). Next, PCR may be carried out with PCR oligonucleotides that anneal to the adapters and to the inserted primer binding sequence to amplify on-target and off-target genomic DNA regions into which the primer binding site was inserted by PE. High throughput sequencing then may be conducted to and sequence alignments to identify the insertion points of PE-inserted primer binding sequences at either the on-target site or at off-target sites.

[0099] FIG. 34 is a schematic showing the precise insertion of a gene with PE.

[0100] FIG. 35A is a schematic showing the natural insulin signaling pathway. FIG. 35B is a schematic showing FKBP12-tagged insulin receptor activation controlled by FK1012.

[0101] FIG. 36 shows small-molecule monomers. References: bumped FK506 mimic (2)¹⁰⁷

[0102] FIG. 37 shows small-molecule dimers. References: FK1012 4⁹⁵⁻⁹⁶; FK1012 5¹⁰⁸; FK1012 6¹⁰⁷; AP1903 7¹⁰⁷; cyclosporin A dimer 8⁹⁸; FK506-cyclosporin A dimer (FkCsA) 9¹⁰⁰.

[0103] FIGS. 38A-38F provide an overview of prime editing and feasibility studies in vitro and in yeast cells. FIG. 38A shows the 75,122 known pathogenic human genetic variants in ClinVar (accessed July, 2019), classified by type. FIG. 38B shows that a prime editing complex consists of a prime editor (PE) protein containing an RNA-guided DNA-nicking domain, such as Cas9 nickase, fused to an engineered reverse transcriptase domain and complexed with a prime editing guide RNA (pegRNA). The PE:pegRNA complex binds the target DNA site and enables a large variety of precise DNA edits at a wide range of DNA positions before or after the target site's protospacer adjacent motif (PAM). FIG. 38C shows that upon DNA target binding, the PE:pegRNA complex nicks the PAM-containing DNA strand. The resulting free 3′ end hybridizes to the primer-binding site of the pegRNA. The reverse transcriptase domain catalyzes primer extension using the RT template of the pegRNA, resulting in a newly synthesized DNA strand containing the desired edit (the 3′ flap). Equilibration between the edited 3′ flap and the unedited 5′ flap containing the original DNA, followed by cellular 5′ flap cleavage and ligation, and DNA repair or replication to resolve the heteroduplex DNA, results in stably edited DNA. FIG. 38D shows in vitro 5′-extended pegRNA primer extension assays with pre-nicked dsDNA substrates containing 5′-Cy5 labeled PAM strands, dCas9, and a commercial M-MLV RT variant (RT, Superscript III). dCas9 was complexed with pegRNAs containing RT template of varying lengths, then added to DNA substrates along with the indicated components. Reactions were incubated at 37° C. for 1 hour, then analyzed by denaturing urea PAGE and visualized for Cy5 fluorescence. FIG. 38E shows primer extension assays performed as in FIG. 38D using 3′-extended pegRNAs pre-complexed with dCas9 or Cas9 H840A nickase, and pre-nicked or non-nicked 5′-Cy5-labeled dsDNA substrates. FIG. 38F shows yeast colonies transformed with GFP-mCherry fusion reporter plasmids edited in vitro with pegRNAs, Cas9 nickase, and RT. Plasmids containing nonsense or frameshift mutations between GFP and mCherry were edited with 5′-extended or 3′-extended pegRNAs that restore mCherry translation via transversion mutation, 1-bp insertion, or 1-bp deletion. GFP and mCherry double-positive cells (yellow) reflect successful editing.

[0104] FIGS. 39A-39D show prime editing of genomic DNA in human cells by PE1 and PE2. FIG. 39A shows pegRNAs contain a spacer sequence, a sgRNA scaffold, and a 3′ extension containing a primer-binding site (green) and a reverse transcription (RT) template (purple), which contains the edited base(s) (red). The primer-binding site hybridizes to the PAM-containing DNA strand immediately upstream of the site of nicking. The RT template is homologous to the DNA sequence downstream of the nick, with the exception of the encoded edit. FIG. 39B shows an installation of a T•A-to-A•T transversion edit at the HEK3 site in HEK293T cells using Cas9 H840A nickase fused to wild-type M-MLV reverse transcriptase (PE1) and pegRNAs of varying primer-binding site lengths. FIG. 39C shows the use of an engineered pentamutant M-MLV reverse transcriptase (D200N, L603W, T306K, W313F, T330P) in PE2 substantially improves prime editing transversion efficiencies at five genomic sites in HEK293T cells, and small insertion and small deletion edits at HEK3. FIG. 39D is a comparison of PE2 editing efficiencies with varying RT template lengths at five genomic sites in HEK293T cells. Values and error bars reflect the mean and s.d. of three independent biological replicates.

[0105] FIGS. 40A-40C show PE3 and PE3b systems nick the non-edited strand to increase prime editing efficiency. FIG. 40A is an overview of the prime editing by PE3. After initial synthesis of the edited strand, DNA repair will remove either the newly synthesized strand containing the edit (3′ flap excision) or the original genomic DNA strand (5′ flap excision). 5′ flap excision leaves behind a DNA heteroduplex containing one edited strand and one non-edited strand. Mismatch repair machinery or DNA replication could resolve the heteroduplex to give either edited or non-edited products. Nicking the non-edited strand favors repair of that strand, resulting in preferential generation of stable duplex DNA containing the desired edit. FIG. 40B shows the effect of complementary strand nicking on PE3-mediated prime editing efficiency and indel formation. “None” refers to PE2 controls, which do not nick the complementary strand. FIG. 40C is a comparison of editing efficiencies with PE2 (no complementary strand nick), PE3 (general complementary strand nick), and PE3b (edit-specific complementary strand nick). All editing yields reflect the percentage of total sequencing reads that contain the intended edit and do not contain indels among all treated cells, with no sorting. Values and error bars reflect the mean and s.d. of three independent biological replicates.

[0106] FIGS. 41A-41K show targeted insertions, deletions, and all 12 types of point mutations with PE3 at seven endogenous human genomic loci in HEK293T cells. FIG. 41A is a graph showing all 12 types of single-nucleotide transition and transversion edits from position +1 to +8 (counting the location of the pegRNA-induced nick as between position +1 and −1) of the HEK3 site using a 10-nt RT template. FIG. 41B is a graph showing long-range PE3 transversion edits at the HEK3 site using a 34-nt RT template. FIGS. 41C-41H are graphs showing all 12 types of transition and transversion edits at various positions in the prime editing window for (FIG. 41C) RNF2, (FIG. 41D) FANCF, (FIG. 41E) EMX1, (FIG. 41F) RUNX1, (FIG. 41G) VEGFA, and (FIG. 41H) DNMT1. FIG. 41I is a graph showing targeted 1- and 3-bp insertions, and 1- and 3-bp deletions with PE3 at seven endogenous genomic loci. FIG. 41J is a graph showing the targeted precise deletions of 5 to 80 bp at the HEK3 target site. FIG. 41K is a graph showing a combination edits of insertions and deletions, insertions and point mutations, deletions and point mutations, and double point mutations at three endogenous genomic loci. All editing yields reflect the percentage of total sequencing reads that contain the intended edit and do not contain indels among all treated cells, with no sorting. Values and error bars reflect the mean and s.d. of three independent biological replicates.

[0107] FIGS. 42A-42H show the comparison of prime editing and base editing, and off-target editing by Cas9 and PE3 at known Cas9 off-target sites. FIG. 42A shows total C•G-to-T•A editing efficiency at the same target nucleotides for PE2, PE3, BE2max, and BE4max at endogenous HEK3, FANCF, and EMX1 sites in HEK293T cells. FIG. 42B shows indel frequency from treatments in FIG. 42A. FIG. 42C shows the editing efficiency of precise C•G-to-T•A edits (without bystander edits or indels) for PE2, PE3, BE2max, and BE4max at HEK3, FANCF, and EMX1. For EMX1, precise PE combination edits of all possible combinations of C•G-to-T•A conversion at the three targeted nucleotides are also shown.

[0108] FIG. 42D shows the total A•T-to-G•C editing efficiency for PE2, PE3, ABEdmax, and ABEmax at HEK3 and FANCF. FIG. 42E shows the precise A•T-to-G•C editing efficiency without bystander edits or indels for at HEK3 and FANCF. FIG. 42F shows indel frequency from treatments in FIG. 42D. FIG. 42G shows the average triplicate editing efficiencies (percentage sequencing reads with indels) in HEK293T cells for Cas9 nuclease at four on-target and 16 known off-target sites. The 16 off-target sites examined were the top four previously reported off-target sites^{118, 159} for each of the four on-target sites. For each on-target site, Cas9 was paired with a sgRNA or with each of four pegRNAs that recognize the same protospacer. FIG. 42H shows the average triplicate on-target and off-target editing efficiencies and indel efficiencies (below in parentheses) in HEK293T cells for PE2 or PE3 paired with each pegRNA in (FIG. 42G). On-target editing yields reflect the percentage of total sequencing reads that contain the intended edit and do not contain indels among all treated cells, with no sorting. Off-target editing yields reflect off-target locus modification consistent with prime editing. Values and error bars reflect the mean and s.d. of three independent biological replicates.

[0109] FIGS. 43A-43I show prime editing in various human cell lines and primary mouse cortical neurons, installation and correction of pathogenic transversion, insertion, or deletion mutations, and comparison of prime editing and HDR. FIG. 43A is a graph showing the installation (via T•A-to-A•T transversion) and correction (via A•T-to-T•A transversion) of the pathogenic E6V mutation in HBB in HEK293T cells. Correction either to wild-type HBB, or to HBB containing a silent mutation that disrupts the pegRNA PAM, is shown. FIG. 43B is a graph showing the installation (via 4-bp insertion) and correction (via 4-bp deletion) of the pathogenic HEXA 1278+TATC allele in HEK293T cells. Correction either to wild-type HEXA, or to HEXA containing a silent mutation that disrupts the pegRNA PAM, is shown. FIG. 43C is a graph showing the installation of the protective G127V variant in PRNP in HEK293T cells via G•C-to-T•A transversion. FIG. 43D is a graph showing prime editing in other human cell lines including K562 (leukemic bone marrow cells), U2OS (osteosarcoma cells), and HeLa (cervical cancer cells). FIG. 43E is a graph showing the installation of a G•C-to-T•A transversion mutation in DNMT1 of mouse primary cortical neurons using a dual split-intein PE3 lentivirus system, in which the N-terminal half is Cas9 (1-573) fused to N-intein and through a P2A self-cleaving peptide to GFP-KASH, and the C-terminal half is the C-intein fused to the remainder of PE2. PE2 halves are expressed from a human synapsin promoter that is highly specific for mature neurons. Sorted values reflect editing or indels from GFP-positive nuclei, while unsorted values are from all nuclei. FIG. 43F is a comparison of PE3 and Cas9-mediated HDR editing efficiencies at endogenous genomic loci in HEK293T cells. FIG. 43G is a comparison of PE3 and Cas9-mediated HDR editing efficiencies at endogenous genomic loci in K562, U2OS, and HeLa cells. FIG. 43H is a comparison of PE3 and Cas9-mediated HDR indel byproduct generation in HEK293T, K562, U2OS, and HeLa cells. FIG. 43I shows targeted insertion of a His6 tag (18 bp), FLAG epitope tag (24 bp), or extended LoxP site (44 bp) in HEK293T cells by PE3. All editing yields reflect the percentage of total sequencing reads that contain the intended edit and do not contain indels among all treated cells. Values and error bars reflect the mean and s.d. of three independent biological replicates.

[0110] FIGS. 44A-44G show in vitro prime editing validation studies with fluorescently labeled DNA substrates. FIG. 44A shows electrophoretic mobility shift assays with dCas9, 5′-extended pegRNAs and 5′-Cy5-labeled DNA substrates. pegRNAs 1 through 5 contain a 15-nt linker sequence (linker A for pegRNA 1, linker B for pegRNAs 2 through 5) between the spacer and the PBS, a 5-nt PBS sequence, and RT templates of 7 nt (pegRNAs 1 and 2), 8 nt (pegRNA 3), 15 nt (pegRNA 4), and 22 nt (pegRNA 5). pegRNAs are those used in FIGS. 44E and 44F; full sequences are listed in Tables 2A-2C. FIG. 44B shows in vitro nicking assays of Cas9 H840A using 5′-extended and 3′-extended pegRNAs. FIG. 44C shows Cas9-mediated indel formation in HEK293T cells at HEK3 using 5′-extended and 3′-extended pegRNAs. FIG. 44D shows an overview of prime editing in vitro biochemical assays. 5′-Cy5-labeled pre-nicked and non-nicked dsDNA substrates were tested. sgRNAs, 5′-extended pegRNAs, or 3′-extended pegRNAs were pre-complexed with dCas9 or Cas9 H840A nickase, then combined with dsDNA substrate, M-MLV RT, and dNTPs. Reactions were allowed to proceed at 37° C. for 1 hour prior to separation by denaturing urea PAGE and visualization by Cy5 fluorescence. FIG. 44E shows primer extension reactions using 5′-extended pegRNAs, pre-nicked DNA substrates, and dCas9 lead to significant conversion to RT products. FIG. 44F shows primer extension reactions using 5′-extended pegRNAs as in FIG. 44B, with non-nicked DNA substrate and Cas9 H840A nickase. Product yields are greatly reduced by comparison to pre-nicked substrate. FIG. 44G shows an in vitro primer extension reaction using a 3′-pegRNA generates a single apparent product by denaturing urea PAGE. The RT product band was excised, eluted from the gel, then subjected to homopolymer tailing with terminal transferase (TdT) using either dGTP or dATP. Tailed products were extended by poly-T or poly-C primers, and the resulting DNA was sequenced. Sanger traces indicate that three nucleotides derived from the gRNA scaffold were reverse transcribed (added as the final 3′ nucleotides to the DNA product). Note that in mammalian cell prime editing experiments, pegRNA scaffold insertion is much rarer than in vitro (FIGS. 56A-56D), potentially due to the inability of the tethered reverse transcriptase to access the Cas9-bound guide RNA scaffold, and/or cellular excision of mismatched 3′ ends of 3′ flaps containing pegRNA scaffold sequences.

[0111] FIGS. 45A-45G show cellular repair in yeast of 3′ DNA flaps from in vitro prime editing reactions. FIG. 45A shows that dual fluorescent protein reporter plasmids contain GFP and mCherry open reading frames separated by a target site encoding an in-frame stop codon, a +1 frameshift, or a −1 frameshift. Prime editing reactions were carried out in vitro with Cas9 H840A nickase, pegRNA, dNTPs, and M-MLV reverse transcriptase, and then transformed into yeast. Colonies that contain unedited plasmids produce GFP but not mCherry. Yeast colonies containing edited plasmids produce both GFP and mCherry as a fusion protein. FIG. 45B shows an overlay of GFP and mCherry fluorescence for yeast colonies transformed with reporter plasmids containing a stop codon between GFP and mCherry (unedited negative control, top), or containing no stop codon or frameshift between GFP and mCherry (pre-edited positive control, bottom). FIGS. 45C-45F show a visualization of mCherry and GFP fluorescence from yeast colonies transformed with in vitro prime editing reaction products. FIG. 45C shows a stop codon correction via T•A-to-A•T transversion using a 3′-extended pegRNA, or a 5′-extended pegRNA, as shown in FIG. 45D. FIG. 45E shows a +1 frameshift correction via a 1-bp deletion using a 3′-extended pegRNA. FIG. 45F shows a −1 frameshift correction via a 1-bp insertion using a 3′-extended pegRNA. FIG. 45G shows Sanger DNA sequencing traces from plasmids isolated from GFP-only colonies in FIG. 45B and GFP and mCherry double-positive colonies in FIG. 45C.

[0112] FIGS. 46A-46F show correct editing versus indel generation with PE1. FIG. 46A shows T•A-to-A•T transversion editing efficiency and indel generation by PE1 at the +1 position of HEK3 using pegRNAs containing 10-nt RT templates and a PBS sequences ranging from 8-17 nt. FIG. 46B shows G•C-to-T•A transversion editing efficiency and indel generation by PE1 at the +5 position of EMX1 using pegRNAs containing 13-nt RT templates and a PBS sequences ranging from 9-17 nt. FIG. 46C shows G•C-to-T•A transversion editing efficiency and indel generation by PE1 at the +5 position of FANCF using pegRNAs containing 17-nt RT templates and a PBS sequences ranging from 8-17 nt. FIG. 46D shows C•G-to-A•T transversion editing efficiency and indel generation by PE1 at the +1 position of RNF2 using pegRNAs containing 11-nt RT templates and a PBS sequences ranging from 9-17 nt. FIG. 46E shows G•C-to-T•A transversion editing efficiency and indel generation by PE1 at the +2 position of HEK4 using pegRNAs containing 13-nt RT templates and a PBS sequences ranging from 7-15 nt. FIG. 46F shows PE1-mediated +1 T deletion, +1 A insertion, and +1 CTT insertion at the HEK3 site using a 13-nt PBS and 10-nt RT template. Sequences of pegRNAs are those used in FIG. 39C (see Tables 3A-3R). Values and error bars reflect the mean and s.d. of three independent biological replicates.

[0113] FIGS. 47A-47S show the evaluation of M-MLV RT variants for prime editing. FIG. 47A shows the abbreviations for prime editor variants used in this figure. FIG. 47B shows targeted insertion and deletion edits with PE1 at the HEK3 locus. FIGS. 47C-47H show a comparison of 18 prime editor constructs containing M-MLV RT variants for their ability to install a +2 G•C-to-C•G transversion edit at HEK3 as shown in FIG. 47C, a 24-bp FLAG insertion at HEK3 as shown in FIG. 47D, a +1 C•G-to-A•T transversion edit at RNF2 as shown in FIG. 47E, a +1 G•C-to-C•G transversion edit at EMX1 as shown in FIG. 47F, a +2 T•A-to-A•T transversion edit at HBB as shown in FIG. 47G, and a +1 G•C-to-C•G transversion edit at FANCF as shown in FIG. 47H. FIGS. 47I-47N show a comparison of four prime editor constructs containing M-MLV variants for their ability to install the edits shown in FIGS. 47C-47H in a second round of independent experiments. FIGS. 470-47S show PE2 editing efficiency at five genomic loci with varying PBS lengths. FIG. 47O shows a +1 T•A-to-A•T variation at HEK3. FIG. 47P shows a +5 G•C-to-T•A variation at EMX1. FIG. 47Q shows a +5 G•C-to-T•A variation at FANCF. FIG. 47R shows a +1 C•G-to-A•T variation at RNF2. FIG. 47S shows a +2 G•C-to-T•A variation at HEK4. Values and error bars reflect the mean and s.d. of three independent biological replicates.

[0114] FIGS. 48A-48C show design features of pegRNA PBS and RT template sequences. FIG. 48A shows PE2-mediated +5 G•C-to-T•A transversion editing efficiency (blue line) at VEGFA in HEK293T cells as a function of RT template length. Indels (gray line) are plotted for comparison. The sequence below the graph shows the last nucleotide templated for synthesis by the pegRNA. G nucleotides (templated by a C in the pegRNA) are highlighted; RT templates that end in C should be avoided during pegRNA design to maximize prime editing efficiencies. FIG. 48B shows +5 G•C-to-T•A transversion editing and indels for DNMT1 as in FIG. 48A. FIG. 48C shows +5 G•C-to-T•A transversion editing and indels for RUNX1 as in FIG. 48A. Values and error bars reflect the mean and s.d. of three independent biological replicates.

[0115] FIGS. 49A-49B show the effects of PE2, PE2 R110S K103L, Cas9 H840A nickase, and dCas9 on cell viability. HEK293T cells were transfected with plasmids encoding PE2, PE2 R110S K103L, Cas9 H840A nickase, or dCas9, together with a HEK3-targeting pegRNA plasmid. Cell viability was measured every 24 hours post-transfection for 3 days using the CellTiter-Glo 2.0 assay (Promega). FIG. 49A shows viability, as measured by luminescence, at 1, 2, or 3 days post-transfection. Values and error bars reflect the mean and s.e.m. of three independent biological replicates each performed in technical triplicate. FIG. 49B shows percent editing and indels for PE2, PE2 R110S K103L, Cas9 H840A nickase, or dCas9, together with a HEK3-targeting pegRNA plasmid that encodes a +5 G to A edit. Editing efficiencies were measured on day 3 post-transfection from cells treated alongside of those used for assaying viability in FIG. 49A. Values and error bars reflect the mean and s.d. of three independent biological replicates.

[0116] FIGS. 50A-50B show PE3-mediated HBB E6V correction and HEXA 1278+TATC correction by various pegRNAs. FIG. 50A shows a screen of 14 pegRNAs for correction of the HBB E6V allele in HEK293T cells with PE3. All pegRNAs evaluated convert the HBB E6V allele back to wild-type HBB without the introduction of any silent PAM mutation. FIG. 50B shows a screen of 41 pegRNAs for correction of the HEXA 1278+TATC allele in HEK293T cells with PE3 or PE3b. Those pegRNAs labeled HEXAs correct the pathogenic allele by a shifted 4-bp deletion that disrupts the PAM and leaves a silent mutation. Those pegRNAs labeled HEXA correct the pathogenic allele back to wild-type. Entries ending in “b” use an edit-specific nicking sgRNA in combination with the pegRNA (the PE3b system). Values and error bars reflect the mean and s.d. of three independent biological replicates.

[0117] FIGS. 51A-51F show a PE3 activity in human cell lines and a comparison of PE3 and Cas9-initiated HDR. Efficiency of generating the correct edit (without indels) and indel frequency for PE3 and Cas9-initiated HDR in HEK293T cells as shown in FIG. 51A, K562 cells as shown in FIG. 51B, U2OS cells as shown in FIG. 51C, and HeLa cells as shown in FIG. 51D. Each bracketed editing comparison installs identical edits with PE3 and Cas9-initiated HDR. Non-targeting controls are PE3 and a pegRNA that targets a non-target locus. FIG. 51E shows control experiments with non-targeting pegRNA+PE3, and with dCas9+sgRNA, compared with wild-type Cas9 HDR experiments confirming that ssDNA donor HDR template, a common contaminant that artificially elevates apparent HDR efficiencies, does not contribute to the HDR measurements in FIGS. 51A-51D. FIG. 51F shows example HEK3 site allele tables from genomic DNA samples isolated from K562 cells after editing with PE3 or with Cas9-initiated HDR. Alleles were sequenced on an Illumina MiSeq and analyzed with CRISPResso2¹⁷⁸. The reference HEK3 sequence from this region is at the top. Allele tables are shown for a non-targeting pegRNA negative control, a +1 CTT insertion at HEK3 using PE3, and a +1 CTT insertion at HEK3 using Cas9-initiated HDR. Allele frequencies and corresponding Illumina sequencing read counts are shown for each allele. All alleles observed with frequency ≥0.20% are shown. Values and error bars reflect the mean and s.d. of three independent biological replicates.

[0118] FIGS. 52A-52D show distribution by length of pathogenic insertions, duplications, deletions, and indels in the ClinVar database. The ClinVar variant summary was downloaded from NCBI Jul. 15, 2019. The lengths of reported insertions, deletions, and duplications were calculated using reference and alternate alleles, variant start and stop positions, or appropriate identifying information in the variant name. Variants that did not report any of the above information were excluded from the analysis. The lengths of reported indels (single variants that include both insertions and deletions relative to the reference genome) were calculated by determining the number of mismatches or gaps in the best pairwise alignment between the reference and alternate alleles.

[0119] FIGS. 53A-53B show FACS gating examples for GFP-positive cell sorting. Below are examples of original batch analysis files outlining the sorting strategy used for generating HEXA 1278+TATC and HBB E6V HEK293T cell lines. The image data was generated on a Sony LE-MA900 cytometer using Cell Sorter Software v. 3.0.5. Graphic 1 shows gating plots for cells that do not express GFP. Graphic 2 shows an example sort of P2A-GFP-expressing cells used for isolating the HBB E6V HEK293T cell lines. HEK293T cells were initially gated on population using FSC-A/BSC-A (Gate A), then sorted for singlets using FSC-A/FSC-H (Gate B). Live cells were sorted for by gating DAPI-negative cells (Gate C). Cells with GFP fluorescence levels that were above those of the negative-control cells were sorted for using EGFP as the fluorochrome (Gate D). FIG. 53A shows HEK293T cells (GFP-negative). FIG. 53B shows a representative plot of FACS gating for cells expressing PE2-P2A-GFP. FIG. 53C shows the genotypes for HEXA 1278+TATC homozygote HEK293T cells. FIG. 53D shows allele tables for HBB E6V homozygote HEK293T cell lines.

[0120] FIG. 54 is a schematic which summarizes the pegRNA cloning procedure.

[0121] FIGS. 55A-55G are schematics of pegRNA designs. FIG. 55A shows a simple diagram of pegRNA with domains labeled (left) and bound to nCas9 at a genomic site (right). FIG. 55B shows various types of modifications to pegRNA which can increase activity. FIG. 55C shows modifications to pegRNA to increase transcription of longer RNAs via promoter choice and 5′, 3′ processing and termination. FIG. 55D shows the lengthening of the P1 system, which is an example of a scaffold modification. FIG. 55E shows that the incorporation of synthetic modifications within the template region, or elsewhere within the pegRNA, could increase activity. FIG. 55F shows that a designed incorporation of minimal secondary structure within the template could prevent formation of longer, more inhibitory, secondary structure. FIG. 55G shows a split pegRNA with a second template sequence anchored by an RNA element at the 3′ end of the pegRNA (left). Incorporation of elements at the 5′ or 3′ ends of the pegRNA could enhance RT binding.

[0122] FIGS. 56A-56D show the incorporation of pegRNA scaffold sequence into target loci. HTS data were analyzed for pegRNA scaffold sequence insertion as described in FIGS. 60A-60B. FIG. 56A shows an analysis for the EMX1 locus. Shown is the % of total sequencing reads containing one or more pegRNA scaffold sequence nucleotides within an insertion adjacent to the RT template (left); the percentage of total sequencing reads containing a pegRNA scaffold sequence insertion of the specified length (middle); and the cumulative total percentage of pegRNA insertion up to and including the length specified on the X axis. FIG. 56B shows the same as FIG. 56A, but for FANCF. FIG. 56C shows the same as in FIG. 56A but for HEK3. FIG. 56D shows the same as FIG. 56A but for RNF2. Values and error bars reflect the mean and s.d. of three independent biological replicates.

[0123] FIGS. 57A-57I show the effects of PE2, PE2-dRT, and Cas9 H840A nickase on transcriptome-wide RNA abundance. Analysis of cellular RNA, depleted for ribosomal RNA, isolated from HEK293T cells expressing PE2, PE2-dRT, or Cas9 H840A nickase and a PRNP-targeting or HEXA-targeting pegRNA. RNAs corresponding to 14,410 genes and 14,368 genes were detected in PRNP and HEXA samples, respectively. FIGS. 57A-57F show Volcano plot displaying the −log 10 FDR-adjusted p-value vs. log 2-fold change in transcript abundance for each RNA, comparing (FIG. 57A) PE2 vs. PE2-dRT with PRNP-targeting pegRNA, (FIG. 57B) PE2 vs. Cas9 H840A with PRNP-targeting pegRNA, (FIG. 57C) PE2-dRT vs. Cas9 H840A with PRNP-targeting pegRNA, (FIG. 57D) PE2 vs. PE2-dRT with HEXA-targeting pegRNA, (FIG. 57E) PE2 vs. Cas9 H840A with HEXA-targeting pegRNA, (FIG. 57F) PE2-dRT vs. Cas9 H840A with HEXA-targeting pegRNA. Red dots indicate genes that show ≥2-fold change in relative abundance that are statistically significant (FDR-adjusted p<0.05). FIGS. 57G-57I are Venn diagrams of upregulated and downregulated transcripts (≥2-fold change) comparing PRNP and HEXA samples for (FIG. 57G) PE2 vs PE2-dRT, (FIG. 57H) PE2 vs. Cas9 H840A, and (FIG. 57I) PE2-dRT vs. Cas9 H840A.

[0124] FIG. 58 shows representative FACS gating for neuronal nuclei sorting. Nuclei were sequentially gated on the basis of DyeCycle Ruby signal, FSC/SSC ratio, SSC-Width/SSC-height ratio, and GFP/DyeCycle ratio.

[0125] FIGS. 59A-59F show the protocol for cloning 3′-extended pegRNAs into mammalian U6 expression vectors by Golden Gate assembly. FIG. 59A shows the cloning overview. FIG. 59B shows ‘Step 1: Digest pU6-pegRNA-GG-Vector plasmid (component 1)’. FIG. 59C shows ‘Steps 2 and 3: Order and anneal oligonucleotide parts (components 2, 3, and 4)’. FIG. 59D shows ‘Step 2.b.ii.: sgRNA scaffold phosphorylation (unnecessary if oligonucleotides were purchased phosphorylated)’. FIG. 59E shows ‘Step 4: pegRNA assembly’. FIG. 59F shows ‘Steps 5 and 6: Transformation of assembled plasmids’. FIG. 59F shows a diagram summarizing the pegRNA cloning protocol.

[0126] FIGS. 60A-60B show the Python script for quantifying pegRNA scaffold integration. A custom python script was generated to characterize and quantify pegRNA insertions at target genomic loci. The script iteratively matches text strings of increasing length taken from a reference sequence (guide RNA scaffold sequence) to the sequencing reads within fastq files, and counts the number of sequencing reads that match the search query. Each successive text string corresponds to an additional nucleotide of the guide RNA scaffold sequence. Exact length integrations and cumulative integrations up to a specified length were calculated in this manner. At the start of the reference sequence, 5 to 6 bases of the 3′ end of the new DNA strand synthesized by the reverse transcriptase are included to ensure alignment and accurate counting of short slices of the sgRNA.

[0127] FIG. 61 is a graph showing the percent of total sequencing reads with the specified edit for SaCas9(N580A)-MMLV RT HEK3+6 C>A. The values for the correct edits as well as indels are shown.

[0128] FIGS. 62A-62B show the importance of the protospacer for efficient installation of a desired edit at a precise location with prime editing. FIG. 62A is a graph showing the percent of total sequencing reads with target T•A base pairs converted to A•T for various HEK3 loci. FIG. 62B is a sequence analysis showing the same.

[0129] FIG. 63 is a graph showing SpCas9 PAM variants in PAM editing (N=3). The percent of total sequencing reads with the targeted PAM edit is shown for SpCas9(H840A)-VRQR-MMLV RT, where NGA>NTA, and for SpCas9(H840A)-VRER-MMLV RT, where NGCG>NTCG. The pegRNA primer binding site (PBS) length, RT template (RT) length, and PE system used are listed.

[0130] FIG. 64 is a schematic showing the introduction of various site-specific recombinase (SSR) targets into the genome using PE. (a) provides a general schematic of the insertion of a recombinase target sequence by a prime editor. (b) shows how a single SSR target inserted by PE can be used as a site for genomic integration of a DNA donor template. (c) shows how a tandem insertion of SSR target sites can be used to delete a portion of the genome. (d) shows how a tandem insertion of SSR target sites can be used to invert a portion of the genome. (e) shows how the insertion of two SSR target sites at two distal chromosomal regions can result in chromosomal translocation. (f) shows how the insertion of two different SSR target sites in the genome can be used to exchange a cassette from a DNA donor template.

[0131] FIG. 65 shows in 1) the PE-mediated synthesis of a SSR target site in a human cell genome and 2) the use of that SSR target site to integrate a DNA donor template comprising a GFP expression marker. Once successfully integrated, the GFP causes the cell to fluoresce.

[0132] FIG. 66 depicts one embodiment of a prime editor being provided as two PE half proteins which regenerate as whole prime editor through the self-splicing action of the split-intein halves located at the end or beginning of each of the prime editor half proteins.

[0133] FIG. 67 depicts the mechanism of intein removal from a polypeptide sequence and the reformation of a peptide bond between the N-terminal and the C-terminal extein sequences. (a) depicts the general mechanism of two half proteins each containing half of an intein sequence, which when in contact within a cell result in a fully-functional intein which then undergoes self-spicing and excision. The process of excision results in the formation of a peptide bond between the N-terminal protein half (or the “N extein”) and the C-terminal protein half (or the “C extein”) to form a whole, single polypeptide comprising the N extein and the C extein portions. In various embodiments, the N extein may correspond to the N-terminal half of a split prime editor and the C extein may correspond to the C-terminal half of a split prime editor. (b) shows a chemical mechanism of intein excision and the reformation of a peptide bond that joins the N extein half (the red-colored half) and the C extein half (the blue-colored half). Excision of the split inteins (i.e., the N intein and the C intein in the split intein configuration) may also be referred to as “trans splicing” as it involves the splicing action of two separate components provided in trans.

[0134] FIG. 68A demonstrates that delivery of both split intein halves of SpPE (SEQ ID NO: 383) at the linker maintains activity at three test loci when co-transfected into HEK293T cells.

[0135] FIG. 68B demonstrates that delivery of both split intein halves of SaPE2 (e.g., SEQ ID NO: 394 and SEQ ID NO: 395) recapitulate activity of full length SaPE2 (SEQ ID NO: 33) when co-transfected into HEK293T cells. Residues indicated in quotes are the sequence of amino acids 741-743 in SaCas

[0136] 9 (first residues of the C-terminal extein) which are important for the intein trans splicing reaction. ‘SMP’ are the native residues, which we also mutated to the ‘CFN’ consensus splicing sequence. The consensus sequence is shown to yield the highest reconstitution as measured by prime editing percentage.

[0137] FIG. 68C provides data showing that various disclosed PE ribonucleoprotein complexes (PE2 at high concentration, PE3 at high concentration and PE3 at low concentration) can be delivered in this manner.

[0138] FIG. 69 shows a bacteriophage plaque assay to determine PE effectiveness in PANCE. Plaques (dark circles) indicate phage able to successfully infect E. coli. Increasing concentration of L-rhamnose results in increased expression of PE and an increase in plaque formation. Sequencing of plaques revealed the presence of the PE-installed genomic edit.

[0139] FIGS. 70A-70I provide an example of an edited target sequence as an illustration of a step-by-step instruction for designing pegRNAs and nicking-sgRNAs for prime editing. FIG. 70A: Step 1. Define the target sequence and the edit. Retrieve the sequence of the target DNA region (˜200 bp) centered around the location of the desired edit (point mutation, insertion, deletion, or combination thereof). FIG. 70B: Step 2. Locate target PAMs. Identify PAMs in proximity to the edit location. Be sure to look for PAMs on both strands. While PAMs close to the edit position are preferred, it is possible to install edits using protospacers and PAMs that place the nick ≥30 nt from the edit position. FIG. 70C: Step 3. Locate the nick sites. For each PAM being considered, identify the corresponding nick site. For Sp Cas9 H840A nickase, cleavage occurs in the PAM-containing strand between the 3^{rd} and 4^{th} bases 5′ to the NGG PAM. All edited nucleotides must exist 3′ of the nick site, so appropriate PAMs must place the nick 5′ to the target edit on the PAM-containing strand. In the example shown below, there are two possible PAMs. For simplicity, the remaining steps will demonstrate the design of a pegRNA using PAM 1 only. FIG. 70D: Step 4. Design the spacer sequence. The protospacer of Sp Cas9 corresponds to the 20 nucleotides 5′ to the NGG PAM on the PAM-containing strand. Efficient Pol III transcription initiation requires a G to be the first transcribed nucleotide. If the first nucleotide of the protospacer is a G, the spacer sequence for the pegRNA is simply the protospacer sequence. If the first nucleotide of the protospacer is not a G, the spacer sequence of the pegRNA is G followed by the protospacer sequence. FIG. 70E: Step 5. Design a primer binding site (PBS). Using the starting allele sequence, identify the DNA primer on the PAM-containing strand. The 3′ end of the DNA primer is the nucleotide just upstream of the nick site (i.e. the 4″ base 5′ to the NGG PAM for Sp Cas9). As a general design principle for use with PE2 and PE3, a pegRNA primer binding site (PBS) containing 12 to 13 nucleotides of complementarity to the DNA primer can be used for sequences that contain ˜40-60% GC content. For sequences with low GC content, longer (14- to 15-nt) PBSs should be tested. For sequences with higher GC content, shorter (8- to 11-nt) PBSs should be tested. Optimal PBS sequences should be determined empirically, regardless of GC content. To design a length-p PBS sequence, take the reverse complement of the first p nucleotides 5′ of the nick site in the PAM-containing strand using the starting allele sequence. FIG. 70F: Step 6. Design an RT template. The RT template encodes the designed edit and homology to the sequence adjacent to the edit. Optimal RT template lengths vary based on the target site. For short-range edits (positions +1 to +6), it is recommended to test a short (9 to 12 nt), a medium (13 to 16 nt), and a long (17 to 20 nt) RT template. For long-range edits (positions +7 and beyond), it is recommended to use RT templates that extend at least 5 nt (e.g., 10 or more nt) past the position of the edit to allow for sufficient 3′ DNA flap homology. For long-range edits, several RT templates should be screened to identify functional designs. For larger insertions and deletions (≥5 nt), incorporation of greater 3′ homology (˜20 nt or more) into the RT template is recommended. Editing efficiency is typically impaired when the RT template encodes the synthesis of a G as the last nucleotide in the reverse transcribed DNA product (corresponding to a C in the RT template of the pegRNA). As many RT templates support efficient prime editing, avoidance of G as the final synthesized nucleotide is recommended when designing RT templates. To design a length-r RT template sequence, use the desired allele sequence and take the reverse complement of the first r nucleotides 3′ of the nick site in the strand that originally contained the PAM. Note that compared to SNP edits, insertion or deletion edits using RT templates of the same length will not contain identical homology. FIG. 70G: Step 7. Assemble the full pegRNA sequence. Concatenate the pegRNA components in the following order (5′ to 3′): spacer, scaffold, RT template and PBS. FIG. 70H: Step 8. Designing nicking-sgRNAs for PE3. Identify PAMs on the non-edited strand upstream and downstream of the edit. Optimal nicking positions are highly locus-dependent and should be determined empirically. In general, nicks placed 40 to 90 nucleotides 5′ to the position across from the pegRNA-induced nick lead to higher editing yields and fewer indels. A nicking sgRNA has a spacer sequence that matches the 20-nt protospacer in the starting allele, with the addition of a 5′-G if the protospacer does not begin with a G. FIG. 70I: Step 9. Designing PE3b nicking-sgRNAs. If a PAM exists in the complementary strand and its corresponding protospacer overlaps with the sequence targeted for editing, this edit could be a candidate for the PE3b system. In the PE3b system, the spacer sequence of the nicking-sgRNA matches the sequence of the desired edited allele, but not the starting allele. The PE3b system operates efficiently when the edited nucleotide(s) falls within the seed region (˜10 nt adjacent to the PAM) of the nicking-sgRNA protospacer. This prevents nicking of the complementary strand until after installation of the edited strand, preventing competition between the pegRNA and the sgRNA for binding the target DNA. PE3b also avoids the generation of simultaneous nicks on both strands, thus reducing indel formation significantly while maintaining high editing efficiency. PE3b sgRNAs should have a spacer sequence that matches the 20-nt protospacer in the desired allele, with the addition of a 5′ G if needed.

[0140] FIG. 71A shows the nucleotide sequence of a SpCas9 pegRNA molecule (top) which terminates at the 3′ end in a “UUU” and does not contain a toeloop element. The lower portion of the figure depicts the same SpCas9 pegRNA molecule but is further modified to contain a toeloop element having the sequence 5′-“GAAANNNNN”-3′ inserted immediately before the “UUU” 3′ end. The “N” can be any nucleobase.

[0141] FIG. 71B shows the results of Example 3, which demonstrates that the efficiency of prime editing in HEK cells or EMX cells is increased using pegRNA containing toeloop elements, whereas the percent of indel formation is largely unchanged.

[0142] FIG. 72 depicts alternative pegRNA configurations that can be used in prime editing. (a) Depicts the PE2:pegRNA embodiment of prime editing. This embodiment involves a PE2 (a fusion protein comprising a Cas9 and a reverse transcriptase) complexed with a pegRNA (as also described in FIGS. 1A-1I and/or FIG. 3A-3E). In this embodiment, the template for reverse transcription is incorporated into a 3′ extension arm on the sgRNA to make the pegRNA, and the DNA polymerase enzyme is a reverse transcriptase (RT) fused directly to Cas9. (b) Depicts the MS2cp-PE2:sgRNA+tPERT embodiment. This embodiment comprises a PE2 fusion (Cas9+a reverse transcriptase) that is further fused to the MS2 bacteriophage coat protein (MS2cp) to form the MS2cp-PE2 fusion protein. To achieve prime editing, the MS2cp-PE2 fusion protein is complexed with an sgRNA that targets the complex to a specific target site in the DNA. The embodiment then involves the introduction of a trans prime editing RNA template (“tPERT”), which operates in place of a pegRNA by providing a primer binding site (PBS) and an DNA synthesis template on separate molecule, i.e., the tPERT, which is also equipped with a MS2 aptamer (stem loop). The MS2cp protein recruits the tPERT by binding to the MS2 aptamer of the molecule. (c) Depicts alternative designs for pegRNAs that can be achieved through known methods for chemical synthesis of nucleic acid molecules. For example, chemical synthesis can be used to synthesize a hybrid RNA/DNA pegRNA molecule for use in prime editing, wherein the extension arm of the hybrid pegRNA is DNA instead of RNA. In such an embodiment, a DNA-dependent DNA polymerase can be used in place of a reverse transcriptase to synthesize the 3′ DNA flap comprising the desired genetic change that is formed by prime editing. In another embodiment, the extension arm can be synthesized to include a chemical linker that prevents the DNA polymerase (e.g., a reverse transcriptase) from using the sgRNA scaffold or backbone as a template. In still another embodiment, the extension arm may comprise a DNA synthesis template that has the reverse orientation relative to the overall orientation of the pegRNA molecule. For example, and as shown for a pegRNA in the 5′-to-3′ orientation and with an extension attached to the 3′ end of the sgRNA scaffold, the DNA synthesis template is orientated in the opposite direction, i.e., the 3′-to-5′ direction. This embodiment may be advantageous for pegRNA embodiments with extension arms positioned at the 3′ end of a gRNA. By reverse the orientation of the extension arm, the DNA synthesis by the polymerase (e.g., reverse transcriptase) will terminate once it reaches the newly orientated 5′ of the extension arm and will thus, not risk using the gRNA core as a template.

[0143] FIG. 73 demonstrates prime editing with tPERTs and the MS2 recruitment system (aka MS2 tagging technique). An sgRNA targeting the prime editor protein (PE2) to the target locus is expressed in combination with a tPERT containing a primer binding site (a13-nt or 17-nt PBS), an RT template encoding a His6 tag insertion and a homology arm, and an MS2 aptamer (located at the 5′ or 3′ end of the tPERT molecule). Either prime editor protein (PE2) or a fusion of the MS2cp to the N-terminus of PE2 was used. Editing was carried out with or without a complementary-strand nicking sgRNA, as in the previously developed PE3 system (designated in the x-axis as labels “PE2+nick” or “PE2”, respectively). This is also referred to and defined herein as “second-strand nicking.”

[0144] FIG. 74 demonstrates that the MS2 aptamer expression of the reverse transcriptase in trans and its recruitment with the MS2 aptamer system. The pegRNA contains the MS2 RNA aptamer inserted into either one of two sgRNA scaffold hairpins. The wild-type M-MLV reverse transcriptase is expressed as an N-terminal or C-terminal fusion to the MS2 coat protein (MCP). Editing is at the HEK3 site in HEK293T cells.

[0145] FIG. 75 provides a bar graph comparing the efficiency (i.e., “% of total sequencing reads with the specified edit or indels”) of PE2, PE2-trunc, PE3, and PE3-trunc over different target sites in various cell lines. The data shows that the prime editors comprising the truncated RT variants were about as efficient as the prime editors comprising the non-truncated RT proteins.

[0146] FIG. 76 demonstrates the editing efficiency of intein-split prime editors. HEK239T cells were transfected with plasmids encoding full-length PE2 or intein-split PE2, pegRNA and nicking guide RNA. Consensus sequence (most amino-terminal residues of C terminal extein) are indicated. Percent editing at two sites in shown: HEK3+1 CTT insertion and PRNP +6 G to T. Replicate n=3 independent transfections.

[0147] FIG. 77 demonstrates the editing efficiency of intein-split prime editors. Editing assessed by targeted deep sequencing in bulk cortex and GFP+ subpopulation upon delivery of 5E10 vg per SpPE3 half and a small amount 1E10 of nuclear-localized GFP:KASH to P0 mice by ICV injection. Editors and GFP were packaged in AAV9 with EFS promoter. Mice were harvested three weeks post injection and GFP+ nuclei were isolated by flow cytometry. Individual data points are shown, with 1-2 mice per condition analyzed.

[0148] FIG. 78 demonstrates the editing efficiency of intein-split prime editors. Specifically, the figures depicts the AAV split-SpPE3 constructs. Co-transduction by AAV particles separately expressing SpPE3-N and SpPE3-C recapitulates PE3 activity. Note N-terminal genome contains a U6-sgRNA cassette expressing the nicking sgRNA, and the C-terminal genome contains a U6-pegRNA cassette expressing the pegRNA.

[0149] FIG. 79 shows the editing efficiency of certain optimized linkers. In particular, the data shows the editing efficiency of the PE2 construct with the current linker (noted as PE2—white box) compared to various versions with the linker replaced with a sequence as indicated at the HEK3, EMX1, FANCF, RNF2 loci for representative pegRNAs for transition, transversion, insertion, and deletion edits. The replacement linkers are referred to as “1×SGGS” (SEQ ID NO: 8), “2×SGGS” (SEQ ID NO: 9), “3×SGGS” (SEQ ID NO: 10), “1×XTEN” (SEQ ID NO: 11), “no linker”, “1×Gly”, “1×Pro”, “1×EAAAK” (SEQ ID NO: 12), “2×EAAAK” (SEQ ID NO: 13), and “3×EAAAK” (SEQ ID NO: 14). The editing efficiency is measured in bar graph format relative to the “control” editing efficiency of PE2. The linker of PE2 is SGGSSGGSSGSETPGTSESATPESSGGSSGGSS (SEQ ID NO: 11). All editing was done in the context of the PE3 system, i.e., which refers the PE2 editing construct plus the addition of the optimal secondary sgRNA nicking guide.

[0150] FIG. 80. Taking the average fold efficacy relative to PE2 yields the graph shown, indicating that use of a 1×XTEN linker sequence improves editing efficiency by 1.14 fold on average (n=15).

[0151] FIG. 81 depicts the transcription level of pegRNAs from different promoters, as described in Example 2.

[0152] FIG. 82 As depicted in Example 2, impact of different types of modifications on pegRNA structure on editing efficiency relative to unmodified pegRNA.

[0153] FIG. 83 Depicts a PE experiment that targeted editing of the HEK3 gene, specifically targeting the insertion of a 10 nt insertion at position +1 relative to the nick site and using PE3. See Example 2.

[0154] FIG. 84A depicts structure of tRNA that can be used to modify pegRNA structures. See Example 2. The P1 can be variable in length. The P1 can be extended to help prevent RNAseP processing of the pegRNA-tRNA fusion.

[0155] FIG. 84B depicts an exemplary pegRNA having a spacer, gRNA core, and an extension arm (RT template+primer binding site), which is modified at the 3′ end of the pegRNA with a tRNA molecule, coupled through a UCU linker. The tRNA includes various post-transcriptional modifications. Said modification are not required, however. See Example 2.

[0156] FIG. 85 depicts a PE experiment that targeted editing of the FANCF gene, specifically targeting a G-to-T conversion at position +5 relative to the nick site and using PE3 construct. See Example 2.

[0157] FIG. 86 depicts a PE experiment that targeted editing of the HEK3 gene, specifically targeting the insertion of a 71 nt FLAG tag insertion at position +1 relative to the nick site and using PE3 construct. See Example 2.

[0158] FIG. 87 results from a screen in N2A cells where the pegRNA installs 1412Adel, with details about the primer binding site (PBS) length and reverse transcriptase (RT) template length. (Shown with and without indels).

[0159] FIG. 88 results from a screen in N2A cells where the pegRNA installs 1412Adel, with details about the primer binding site (PBS) length and reverse transcriptase (RT) template length. (Shown with and without indels).

[0160] FIG. 89 depicts results of editing at a proxy locus in the β-globin gene and at HEK3 in healthy HSCs, varying the concentration of editor to pegRNA and nicking gRNA.

[0161] FIG. 90A shows RT-qPCR data demonstrating that using in vitro transcribed pegRNA, which is undegraded and full length, PCR amplicons 3 and 6 amplify with the same efficiency as an amplicon consisting of the spacer and scaffold regions of the pegRNA. Amplicon 3 contains the template region of the pegRNA, whereas amplicon 6 contains the PBS of the pegRNA. Bars are the average of 3 technical replicates.

[0162] FIG. 90B shows RT-qPCR data demonstrating that the pegRNA template and PBS are reduced in abundance after extraction from cells, particularly the PBS, in comparison to in vitro transcribed pegRNA put through the same extraction process.

[0163] FIG. 90C provides the template amplicon and PBS amplicon sequences correspond to amplicon 3 and 6 respectively in the FIG. 90B.

[0164] FIG. 91A-91D provides the results of scaffold modifications on pegRNA activity for edits +1FLAG at HEK3 (FIG. 91A), +5G-T at RNF2 (FIG. 91B), +5G-T at DNMT1 (FIG. 91C), and +5G-T at EMX1 (FIG. 91D). Modifications to P1, P2, and P3 of the scaffold broadly kill activity. Modifications to the direct repeat can improve activity.

[0165] FIG. 92A-92C provides +1FLAG insertion edits at HEK3 (FIG. 91A), RNF2 (FIG. 91B) and RUNX1 (FIG. 91C) loci. pegRNAs include structural motif and linkers as noted. If the linker length is not given, length is 8.

[0166] FIG. 93A-93H shows the results of PE of the indicated edit (in the title as a deletion “del” or point mutation) at the indicated site for pegRNAs with 3′ structural motifs (linker=8; motif=linker+evopreQ₁-1 or linker+MMLV-pknot), linker alone (linker=8; motif no 3′ addition (linker=0; motif=“−”) at a variety of template lengths (15 nucleotides (“template 15”), 25 nucleotides (“template 25”), and 35 nucleotides (“template 35”)). Blue bars indicate % of total sequencing reads with the correct edits. The grey bars track the appearance of indels as a % of total sequencing reads.

[0167] FIG. 94 shows the summary of effect of either linker alone, linker+evopreQ₁-1 or linker+Mpknot-1 on prime editing activity, summarizing data in FIGS. 93A-H. Line indicates median fold increase.

[0168] FIG. 95A-95B shows the editing efficiency in Hela, U20S, and K562 cells lines for insertion of the nucleotide sequence corresponding to the FLAG tag at the HEK3 locus after plasmid nucleofection. Results are an average of three biological replicates. Results indicate that the increase in efficacy of the 3′ stabilizing modifications may be greater in other cell types where delivery of editing agents is less efficient.

[0169] FIG. 96 shows the effect of mutations mut1 and mut2 on prime editing activity. Mutations are predicted to disrupt the structure of evopreQ₁-1.

[0170] FIG. 97 shows RT-qPCR data demonstrating that the 3′ structural motifs preserve the 3′ end of the pegRNA, particularly the PBS which is critical for prime editing, versus the unmodified species. Bars are the average of three biological replicates, each of which are the average of three technical replicates. Template amplicon and PBS amplicon correspond to amplicons 3 and 6, respectively.

[0171] FIG. 98 provides a schematic of a pegRNA appended at 3′ end with a nucleic acid moiety, which may include, but is not limited to a double helix moiety, a toeloop moiety, a hairpin moiety, a stem-loop moiety, a pseudoknot moiety, an aptamer moiety, a G quadraplex moiety, or a tRNA moiety. The nucleic acid moiety can be joined to the 3′ end of the pegRNA by an optional nucleotide linker (e.g., 3-18 nucleotides).

[0172] FIG. 99 is a schematic of an expression vector comprising a U6 promoter, which was surprisingly found to result in improved editing efficiency.

[0173] FIG. 100A-100E. Demonstrates that use of U6 promoters (including U6 wildtype, US v4, U6 v7, and U6 v9) to express pegRNAs leads to improved editing.

[0174] FIG. 101 shows the folding for evopreq1 nucleic acid moiety which can be used to modify pegRNA.

[0175] FIG. 102 shows the folding for Mpknot1 nucleic acid moiety which can be used to modify pegRNA.

[0176] FIG. 103 shows the folding for tRNA nucleic acid moiety which can be used to modify pegRNA.

[0177] FIGS. 104A-104C show that truncated pegRNAs limit prime editing efficiency. FIG. 104A (left) provides a schematic of a prime editing complex composed of a prime editor (PE) protein that consists of a Cas9 nickase (nCas9) fused to a modified reverse transcriptase via a flexible linker and a prime editing guide RNA (pegRNA). FIG. 104A (right) shows that degradation of the 3′ extension of a pegRNA by exonucleases could impede editing efficiency through loss of the PBS. FIG. 104B shows PE3-mediated editing efficiencies with the addition of plasmids expressing sgRNAs, truncated pegRNAs that target the same genomic locus (HEK3), non-targeting pegRNA, or SaCas9 pegRNAs. All pegRNAs are expressed from a U6 promoter. Data and error bars reflect the mean and standard deviation of three independent biological replicates. FIG. 104C shows the design of engineered pegRNAs (epegRNAs) that contain a structured RNA pseudoknot, which protects the 3′ extension from degradation by exonucleases.

[0178] FIGS. 105A-105D show that PE editing efficiency is enhanced by the addition of structured RNA motifs to the 3′ terminus of pegRNAs. FIG. 105A shows the efficiency of PE3-mediated insertions of the FLAG epitope tag at the +1 editing position (insertion directly at the pegRNA-induced nick site) across multiple genomic loci in HEK293T cells using canonical pegRNAs (“unmodified”), pegRNAs with either evopreQ₁ or mpknot motif appended to the 3′ end of the PBS connected via an 8-nt linker sequence, or pegRNAs appended with only the 8-nt linker sequence on the 3′ end. FIG. 105B provides a summary of the fold-change in PE editing efficiency relative to canonical pegRNAs of the indicated edit at various genomic loci upon addition of the indicated 3′ motif via an 8-nt linker, or the addition of the linker alone. “Transversion” denotes mutation of the +5 G•C to T•A at RUNX1, EMX1, VEGFA, and DNMT1, the +1 C•G to T•A at RNF2, and the +1 T•A to A•T at HEK3, where the positive integer indicates the distance from the Cas9 nick site. “Deletion” denotes a 15-bp deletion at the Cas9 nick site. Data summarized here are presented in FIG. 105C and FIGS. 109A-109K. The horizontal bars show the median values. FIG. 105C shows representative improvements in PE editing efficiency as a result of appending either evopreQ₁ (p) or mpknot (m) via an 8-nt linker to pegRNAs with varying template lengths (in nucleotides, indicated). FIG. 105D shows editing activities of canonical pegRNAs and modified pegRNAs across three genomic loci in HeLa cells, U2OS cells, and K562 cells. Data and error bars indicate the mean and standard deviation of three independent biological replicates (FIGS. 105A, 105C, and 105D).

[0179] FIGS. 106A-106D show that structural motifs increase the RNA stability and efficiency of reverse transcription. FIG. 106A shows resistance of unmodified pegRNA or epegRNA containing evopreQ₁ or mpknot to degradation upon exposure to HEK293T nuclear lysates. The agarose gel shown is representative of three experiments. Untreated in vitro transcribed pegRNAs or epegRNAs served as standards. Percent RNA remaining was calculated using densitometry. Significance was analyzed using a two-tailed unpaired Student's t test (p=0.0028 for mpknot and 0.0022 for evopreQ1). FIG. 106B shows fold change in abundance of the pegRNA scaffold relative to unmodified pegRNA upon exposure to HEK293T nuclear lysates in the absence and presence of nCas9 as determined by RT-qPCR of the sgRNA scaffold. FIG. 106C shows a comparison of prime-editing intermediates generated by PE2 with either pegRNAs or epegRNAs at RNF2. Dotted lines indicate the full-length reverse transcriptase product templated by the pegRNA or epegRNA tested at the indicated locus. X axis is relative to the position of the PE2-induced nick with the first base 3′ downstream represented as position +1. Histograms and pie charts are generated from the average of three independent biological replicates. FIG. 106D shows PE3 editing efficiencies in HEK293T cells using unmodified pegRNAs, pegRNAs containing the evopreQ1 motif, or pegRNAs containing a G15C point mutant of evopreQ₁ (M1) that disrupts the pseudoknot motif structure. FIG. 106E shows the fraction of Cas9 RNPs composed of dCas9 and either unmodified pegRNA or epegRNA containing either evopreQ1 or mpknot and templating a +1 FLAG tag insertion at HEK3 bound to dsDNA as determined by MST. FIG. 106F shows CRISPRa transcriptional activation by pegRNAs, epegRNAs, and sgRNAs. Reported GFP fluorescence is normalized to iRFP fluorescence expressed from a co-transfected plasmid. AU, arbitrary units. FIG. 106G shows the fraction of unmodified pegRNA or epegRNA (templating a +1 FLAG tag insertion at HEK3) containing either evopreQ1 or mpknot bound to H840A nCas9 as determined by microscale thermophoresis (MST). Data and error bars reflect the mean and standard deviation of three independent biological replicates. FIG. 106H shows the abundance of epegRNA and canonical pegRNA used in FIG. 106A in HEK293T cells by RT-qPCR amplification and quantification of the sgRNA scaffold. Primers can be found in Table E5. FIGS. 107A-107E show that prime editing-mediated editing efficiency of therapeutically relevant genome editing is improved by the use of epegRNAs. FIG. 107A shows PE3-mediated installation of the G127V mutation in PRNP that protects against human prion disease. FIGS. 107B-107C show correction of the pathogenic c1278TATC insertion in HEXA that causes Tay Sachs disease in both HEK293T cells (FIG. 107B) and primary patient-derived fibroblasts (FIG. 107C). FIG. 107D shows a comparison of PE2-mediated installation of pathogenic and protective alleles using unoptimized epegRNAs or unoptimized pegRNAs at nine genomic sites. Reference SNP (rs) designations can be found for all mutations in Table E6. FIG. 107E shows PE2-mediated editing efficiency of FLAG epitope tag insertion at 15 genomic loci in HEK293T cells using unoptimized epegRNAs compared to unoptimized canonical pegRNAs. Data and error bars indicate the mean and standard deviation of three independent biological replicates.

[0180] FIG. 108 shows the sequences and secondary structures of RNA structural motifs examined in this study. Structures are based on predictions from previously published structural or bioinformatic analyses. Only two G-quadruplexes of the 11 tested are shown for brevity. Sequences of all motifs are provided in Table E2.

[0181] FIGS. 109A-109C show PE3-mediated edit:indel ratio for pegRNAs and epegRNAs shown in FIGS. 105A-105D. Fold-change in the observed prime editing edit:indel ratio for installation of a FLAG epitope tag (FIG. 109A) or the indicated transversion or deletion (FIG. 109B) in HEK293T cells, or the indicated edit in HeLa, U20S, or K562 cells (FIG. 109C) of epegRNAs bearing either evopreQ1 (p) or mpknot (m) compared to unmodified pegRNA (dashed line). Values were calculated from the data presented in FIGS. 105A, 105C, and 105D, respectively. Data and error bars reflect the mean and standard deviation of three independent biological replicates.

[0182] FIG. 110 shows the linker-length dependence of epegRNA activity. Effect of removing the 8-nt linkers used in FIGS. 105A-105D and FIGS. 111A-111K on PE3 editing efficiency. Either evopreQ1 (p) or mpknot (m) was appended to the PBS via either no linker or an 8-nt linker. The distance from the Cas9 nick site to the installed mutation in nucleotides is as indicated in the legend. Dots indicate the average of three biological replicates. Bars indicate the grand median. Significance was calculated via a two-tailed paired Student's t test (p=0.022).

[0183] FIGS. 111A-111K show improvement in PE3-mediated editing efficiency at various genomic loci from to the addition of 3′ RNA structural motifs to pegRNAs. FIGS. 111A-111K show PE3-mediated installation of the indicated edit at DNMT1 (FIGS. 111A-111B), RUNX1 (FIG. 111C), RNF2 (FIGS. 111D-109E), FANCF (FIGS. 111F-111G), EMX1 (FIGS. 111H-111I), VEGFA (FIG. 111J), and HEK3 (FIG. 111K). Either an 8-nt linker alone or the linker in conjunction with evopreQ1 (p) or mpknot (m) was appended to pegRNAs of increasing template lengths and compared to canonical pegRNAs. The distance from the Cas9 nick site to the installed mutation is indicated. Error bars indicate the standard deviation of three replicates.

[0184] FIGS. 112A-112C show PE3-mediated edit:indel ratio for pegRNAs and epegRNAs shown in FIG. 110. Fold-change in the observed edit:indel ratio for the indicated transversion or deletion at HEK3, RUNX1, or DNMT1 (FIG. 112A), RNF2 or FANCF (FIG. 112B), or EMX1 or VEGFA (FIG. 112C) of epegRNAs bearing either evopreQ1 (p) or mpknot (m) compared to unmodified pegRNA (dashed line). Values were calculated from the data presented in FIGS. 109A-109C. Data and error bars reflect the mean and standard deviation of three independent biological replicates.

[0185] FIG. 113 shows that the engineered pegRNAs demonstrate no increase in detected off-target activity compared to canonical pegRNAs. On- and off-target PE3 editing of pegRNAs and epegRNAs targeted to HEK3, EMX1, or FANCF and templating either a nucleotide transversion (T•A to A•T at HEK3 or G•C to T•A at EMX1 and FANCF; pt mtn) or a 15-nt deletion (del); −, canonical pegRNA; m, epegRNA containing mpknot; p, epegRNA containing evopreQ1. Indel frequencies are shown in parentheses. For EMX1 off-target 1, indels were obtained by subtracting the percentage of sequencing reads containing indels in cells transfected with a non-targeting pegRNA. Off-target loci are listed in Table E4. Data are the average of three biological replicates. FIGS. 114A-114C shows site-dependent expression differences of pegRNAs and epegRNAs. Northern blot of HEK293T lysates containing pegRNAs or epegRNAs targeted to (FIG. 114A) HEK3 or (FIG. 114B) EMX1 after hybridization with a DIG-labeled RNA probe complementary to the sgRNA scaffold. PAGE gels shown are representative of multiple independent biological replicates. The normalized fold change in abundance relative to unmodified pegRNA as determined by densitometry is shown (right). Abundance was calculated by including both full-length pegRNA and epegRNA for samples in which full length pegRNA is present. Band identity was confirmed using untreated in vitro transcribed pegRNAs and epegRNAs as standards, DIG-labeled ssRNA ladder, and purified RNA from HEK293T cells transfected with sgRNA as markers. FIG. 114C shows the abundance of epegRNA and canonical pegRNA targeted to HEK3, DNMT1, RNF2 or EMX1 in HEK293T cells by RT-qPCR amplification and quantification of the sgRNA scaffold. Primers for qPCR amplification can be found in Table E5. Data and error bars reflect the mean and standard deviation of three independent biological replicates.

[0186] FIGS. 115A-115C show high-throughput sequencing analysis of PE2-mediated genomic reverse transcriptase products. Comparison of prime-editing intermediates generated by PE2 with either pegRNAs or epegRNAs at (FIG. 115A) HEK3, (FIG. 115B) DNMT1, or (FIG. 115C) EMX1 as indicated. Dotted lines indicate the full-length reverse transcriptase product templated by the pegRNA or epegRNA tested at the indicated locus. X axis is relative to the position of the PE2-induced nick with the first base 3′ downstream represented as position +1. Histograms and pie charts are generated from the average of three independent biological replicates.

[0187] FIGS. 116A-116D show PE3-mediated editing efficiency of pegRNAs containing other RNA structural motifs. FIGS. 116A-116B show a comparison of PE3-mediated editing efficiencies for the installation of the FLAG epitope tag, a 15-nt deletion, or a point mutation at HEK3 (FIG. 116A) and RNF2 (FIG. 116B) with epegRNAs to which various G-quadruplexes have been appended via an 8-nt linker. G-quadruplexes are ordered based on melting temperature, ranging from 60 to >90° C., as previously determined. FIG. 116C shows PE3-mediated efficiency of installation of point mutations at the indicated genomic loci using pegRNAs containing the evopreQ1 motif or a 15-bp (34-nt) hairpin. FIG. 116D shows that the addition of either a pseudoknot known to inhibit the 5′ exonuclease XrnI (xrn1) or a large tertiary RNA structure (the P4-P6 domain of the group I intron from Tetrahymena thermophila) to the 3′ terminus of the pegRNA via an 8-nt linker does not yield more efficient editing than addition of either evopreQ1 or mpnkot by the same linker. The distance from the Cas9 nick site to the installed mutation is indicated. Data and error bars indicate the standard deviation of three independent biological replicates.

[0188] FIGS. 117A-117C show PE3-mediated editing efficiency of epegRNAs containing evopreQ₁ or mpknot variants. A comparison of PE3-mediated editing efficiencies is shown for the installation of the FLAG epitope tag, a 15-nt deletion, or a point mutation at HEK3 and RNF2 with epegRNAs containing various RNA motifs, where the distance between the Cas9 nick and the edit is indicated by +1. FIGS. 117A-117B show PE3 editing efficiencies of additional evolved prequeosine₁-1 riboswitch aptamer variants (FIG. 117A) or modifications to mpknot (FIG. 117B) compared to evopreQ₁ or mpknot. FIG. 117C shows PE3 editing efficiencies of epegRNAs trimmed to remove nucleotides 5′ and 3′ of evopreQ₁ (tevopreQ₁) and mpknot (tmpknot) compared to parent epegRNAs. Data and error bars indicate the mean and standard deviation of three independent biological replicates.

[0189] FIG. 118 shows the effect of the (F+E) scaffold on PE2-editing efficiency with lentivirally transduced epegRNAs. PE2-editing efficiency of lentivirally-transduced prime editor and pegRNA or epegRNA that contain tevopreQ1 and either the canonical or (F+E) sgRNA scaffold and that template the indicated edit at HEK3 or DNMT1 in HEK293T cells. Data and error bars reflect the mean and standard deviation of three independent biological replicates.

[0190] FIG. 119 shows the effect of (F+E) scaffold modifications on prime editing efficiency with epegRNAs. Comparison of PE3-mediated editing efficiencies of epegRNAs with the indicated scaffold to epegRNAs with the standard SpCas9 sgRNA scaffold. One-tenth the normal amount of plasmids encoding PE2 and pegRNA or epegRNA was transfected in HEK293T cells in these experiments. Edits templated were either a transversion at PRNP, RUNX1, or EMX1 or a 15-nt deletion at HEK3. Modified scaffold sequences all contain the “flip and extension” (F+E) modification. Scaffolds designated cr also contain mutations to the (F+E) scaffold previously identified as potentially improving Cas9 nuclease activity at some sites⁶. Sequences of all scaffolds can be found in Table E1. Lines indicate the grand medians.

[0191] FIGS. 120A-120F show computational prediction of effective linker sequences between the PBS and structural motif of epegRNAs. FIG. 120A provides a schematic illustrating the workflow of pegLIT, a computational script to select appropriate linker sequences for epegRNAs. Potential linker sequences are filtered by sequence identity and propensity for base pairing to other regions of the epegRNA. Sequences passing the filter are then optionally clustered based on identity and individual sequences are selected from different clusters to promote diversity in the final output. FIGS. 120B-120C show that epegRNAs containing evopreQ₁ connected via linker sequences recommended by pegLIT lead to modestly improved PE editing efficiency compared to epegRNAs containing evopreQ₁ connected via a human-designed linker or linkers that were predicted by pegLIT to interact with the PBS. FIG. 120D shows rescued activity at those sites at which epegRNAs did not initially yield improvements (FIGS. 111A-111K). FIG. 120E shows that a comparison of PE3-mediated editing efficiencies of epegRNAs with evopreQ₁ and either 8- or 18-nt long linkers suggests no significant improvement is achieved by increasing linker length. FIG. 120F shows a comparison of PE3-mediated editing efficiencies of epegRNAs with either evopreQ₁ (p) or mpknot (m) and either an 8-nt pegLIT linker (8) or no linker (0). Significance was calculated using student's t test (p=0.0061). FIG. 120G shows the fold increase in PE3-mediated editing efficiencies of epegRNAs with tevopreQ1 containing an 8-nt pegLIT linker compared to no linker. Data are presented as the mean with error bars indicating either (FIG. 120B) the standard deviation of the mean for five pegLIT-designed linkers, each in triplicate, or the standard deviation of three replicates for manually designed linker sequences, (FIGS. 120C, 120D, and 120G) the standard deviation of three replicates, or (FIGS. 120E-120F) or the grand mean of the average fold-change in editing efficiency for each indicated site and edit.

[0192] FIGS. 121A-121B show improvements in editing efficiency upon nucleofection of chemically synthesized epegRNAs. FIG. 121A shows efficiency of PE3-mediated installation of the indicated edit upon nucleofection of mRNA which encodes PE2, a chemically synthesized nicking sgRNA, and either chemically synthesized pegRNA or epegRNA containing evopreQ₁ via an 8-nt linker is shown. FIG. 121B shows Observed fold-change in the edit:indel ratio for epegRNAs compared to pegRNAs for the indicated site and edit, based on data in FIG. 121A. Data and error bars indicate the standard deviation of two or more independent biological replicates.

[0193] FIGS. 122A-122B show PE2-mediated efficiency of installation of FLAG tags at the indicated genomic sites. FIG. 122A shows PE2-mediated editing efficiency of FLAG epitope tag insertion at 15 genomic loci in HEK293T cells using unoptimized epegRNAs compared to unoptimized canonical pegRNAs. FIG. 122B shows data from FIG. 122A shown in bar chart form. Sites with sub 1% editing efficiency with both pegRNAs and epegRNAs are not shown but are listed in Table E1. Data and error bars reflect the mean and standard deviation of three independent biological replicates.

[0194] FIG. 123 provides an image of the uncropped agarose gel from FIG. 106A. Uncropped image of the agarose gel used for FIG. 106A with the excerpted region outlined in black. Untreated in vitro transcribed pegRNAs or epegRNAs were used as molecular weight standards.

[0195] FIGS. 124A-124C show uncropped northern blots in FIGS. 114A-114C. FIG. 124A shows an uncropped image of the northern blot used for FIG. 114A with the excerpted region outlined in black. Species lengths were confirmed using untreated in vitro transcribed pegRNA and epegRNA as molecular weight standards on a separate blot with a molecular weight ladder (shown in FIG. 124B). FIG. 124B shows an uncropped image of the northern blot used to confirm the band identities and molecular weights of standards in FIG. 124A. FIG. 124C shows an uncropped image of the northern blot used for FIG. 114B with the excerpted region outlined in black.

[0196] FIGS. 125A-125E show the effect of various sgRNA scaffolds on editing efficiency in HEK293T cells.

[0197] FIGS. 126A-126B show that flip and extension modifications can improve prime editing efficiency in certain instances.

[0198] FIGS. 127A-127B show that various sgRNA scaffolds can improve prime editing efficiency in certain instances.

[0199] FIG. 128 is a flowchart of an illustrative process 11800 for identifying one or more nucleic acid linkers for coupling a prime editing guide RNA to a nucleic acid moiety, in accordance with some embodiments of the technology described herein. The process 11800 may be implemented using any suitable computing device(s), as aspects of the technology described herein are not limited in this respect.

[0200] FIG. 129 is a flowchart of an illustrative process 11900 for iteratively identifying one or more nucleic acid linkers for coupling a prime editing guide RNA to a nucleic acid moiety, in accordance with some embodiments of the technology described herein. The process 11900 may be implemented using any suitable computing device(s), as aspects of the technology described herein are not limited in this respect.

[0201] FIG. 130 shows an illustrative implementation of a computer system 12000 in which embodiments of the technology described herein may be implemented. For example, any of the computing devices described herein may be implemented as computing system 12000. The computing system 12000 may include one or more computer hardware processors 12002 and one or more articles of manufacture that comprise non-transitory computer-readable storage media (e.g., memory 12004 and one or more non-volatile storage devices 12006). The processor 12002(s) may control writing data to and reading data from the memory 12004 and the non-volatile storage device(s) 12006 in any suitable manner. To perform any of the functionality described herein, the processor(s) 12002 may execute one or more processor-executable instructions stored in one or more non-transitory computer-readable storage media (e.g., the memory 12004), which may serve as non-transitory computer-readable storage media storing processor-executable instructions for execution by the processor(s) 12002.

[0202] FIG. 131 shows three broad areas in which prime editing can be improved. These include recognition of the target nucleic acid, installation of the edit(s), and resolution of the edited DNA heteroduplex.

[0203] FIG. 132 shows that PBS:spacer interactions limit PE efficiency by reducing Cas9 affinity but are necessary in order for PBS:protospacer binding to occur. A shorter PBS is shown to result in improved binding affinity to Cas9.

[0204] FIG. 133 shows that toeholds can inhibit both PBS:spacer and PBS:protospacer interactions if independent of Cas9 binding.

[0205] FIG. 134 shows that toeholds are competed off by PE2 binding due to competitive RNA-protein interactions. Design considerations include 1) the interdependence of the lengths of both Cas9-RT and RT-MS2 linker, the pegRNA extension and PBS, toehold, and linker between MS2 aptamer and toehold; 2) toehold length dependence upon PBS melting temperature and site accessibility; 3) optimization for each site; and 4) tolerance for a non-interacting 17 nucleotide PBS.

[0206] FIG. 135 shows that C-terminal MS2 fusions display superior editing efficiency to N-terminal fusions at HEK3.

[0207] FIG. 136 shows that MS2 tagging of PE2 provides benefits compared to untagged PE2. PE2-MS2 fusions comprising an xten-16aa linker or an xten-33aa linker are shown.

[0208] FIG. 137 shows that MS2 and toeloop tagging rescues long primer binding sites. PE2-MS2 fusions comprising an xten-16aa linker or an xten-33aa linker are shown.

[0209] FIG. 138 shows moving the pegRNA extension onto the nicking guide to completely avoid PBS-spacer interactions. Design considerations include: 1) the impact of an extended template as a linker on flap resolution; 2) optimization of nicking spacer; and 3) the need for both PE complexes to be present on the genome simultaneously.

[0210] FIG. 139 shows that the strategy shown in FIG. 138 (moving the pegRNA extension onto the nicking guide) enables prime editing.

[0211] FIG. 140 shows a model based on mismatch identity and position within the PBS relative to the nick.

[0212] FIG. 141 shows that mutations to the PBS are tolerated or in some circumstances enhance PE activity and fit an initial model where mutation location and identity determine PE efficiency.

[0213] FIG. 142 shows that longer PBS (RNF2, 15 nt) do not tolerate mutations, potentially because they inhibit PBS:protospacer interactions excessively.

[0214] FIG. 143 shows that mutations to the PBS can improve PE efficiency for pegRNAs with shorter optimal PBS's. MutPBS epegRNAs have a mutPBS of 17 with 4 consecutive mutations (HEK3, DNMT1, PRNP) or a mutPBS of fifteen with four consecutive mutations (RNF2), followed by an 8 nt linker and tevopreQ₁.

[0215] FIG. 144 shows that mutPBS improvements can provide additional enhancements in editing efficiency when used in combination with epegRNAs.

[0216] FIG. 145 demonstrates that prime editing (e.g., with PE3) can be used to install or correct pathogenic alleles and sequence tags.

[0217] FIG. 146 demonstrates an embodiment of a prime editing strategy to install and correct CDKL5 c.1412delA mutation.

[0218] FIG. 147 demonstrates that prime editing using the pegRNA of FIG. 146 can be used to edit the CDKL5 c.1412delA mutation in human cells.

[0219] FIG. 148 demonstrates that a single prime editor (e.g., PE2) complexed with a single pegRNA is capable of correcting a multitude of pathogenic variants in the CDKL5 gene in exon 8, including correcting the V172I, A173D, R175S, W176G, W176R, Y177C, R178P, P180L, E181A, and L182P mutations.

[0220] FIG. 149 demonstrates that a single prime editor (e.g., PE2) complexed with a single pegRNA is capable of correcting a multitude of pathogenic mutations at positions +4, +8, +12, +17, +21, and +25 relative to position 1 of the PAM sequence (i.e., the nucleotide in the 5′-most position).

[0221] FIG. 150 shows CDKL5 c1412delA prime editing transfection in N2A cells.

[0222] FIG. 151 shows editing efficiency of a 1412delA insertion in N2A cells using epegRNA 072 with no seed editing.

[0223] FIG. 152 shows editing efficiency of a 1412delA insertion in N2A cells using PE5 and various pegRNAs with the addition of a seed edit.

[0224] FIG. 153 shows editing efficiency of installation of multiple pathogenic CDKL5 alleles in HEK293T cells via plasmid transfection.

[0225] FIG. 154 shows a schematic of PE2 and PEmax editor architectures. bpNLSSV40, bipartite SV40 NLS nuclear localization signal. MMLV RT, Moloney Murine Leukemia Virus reverse transcriptase pentamutant; codon opt., human codon-optimized.

[0226] FIG. 155 compares the structure of PE2, PE3, PE4, and PE5. In particular, the PE4 editing system consists of a prime editor enzyme (nickase Cas9-RT fusion), MLH1dn, and pegRNA. The PE5 editing system consists of a prime editor enzyme, MLH1dn, pegRNA, and second-strand nicking sgRNA.

[0227] FIG. 156 shows prime editing at CDKL5 in wild-type HeLa and HEK293T cells. The CDKL5 edit is at a site for which the c.1412delA mutation causes CDKL5 deficiency disorder. epegRNAs were used for editing the CDKL5 locus. Bars represent the mean of n=3 independent biological replicates.

[0228] FIG. 157 shows correction of CDKL5 c.1412delA via an A•T insertion and a silent G•C-to-A•T edit in iPSCs derived from a patient heterozygous for the allele. Editing efficiencies indicate the percentage of sequencing reads with c.1412delA correction out of editable alleles that carry the mutation. Indel frequencies reflect all sequencing reads that contain any indels. Bars represent the mean of n=3 independent biological replicates.

[0229] FIG. 158 shows the correction of CDKL5 c.1412delA via an A•T insertion and a G•C-to-A•T edit in iPSCs derived from a patient heterozygous for the disease allele. Editing efficiencies indicate the percentage of sequencing reads with c.1412delA correction out of editable alleles that carry the mutation. Indel frequencies reflect all sequencing reads that contain any indels that do not map to the c.1412delA allele or wild-type sequence. 1 μg of PE2 mRNA was used in all conditions shown. Bars represent the mean of n=3 independent biological replicates.

[0230] FIG. 159 shows the combination of MLH1dn and epegRNAs for CDKL5 editing. The editing efficiency of a CDKL5 c.1412 A to G mutation in HEK293T cells is shown.

[0231] FIG. 160 shows optimization of the nicking sgRNA for prime editing at CDKL5. The editing efficiency of installation of a CDKL5 silent +1 C to T mutation (c.1412delA site) in HEK293T cells is shown.

[0232] FIG. 161 shows that SpCas9-PE can generate indel byproducts when editing wild type CDKL5.

[0233] FIG. 162 shows that NRCH SpCas9 variant prime editors do not generate indel byproducts when editing wild type CDKL5.

[0234] FIG. 163 shows that NRTH SpCas9 variant prime editors do not generate indel byproducts when editing wild type CDKL5.

[0235] FIG. 164 shows optimization of pegRNAs for installation of a nucleotide transition at c.1412 in the CDKL5 gene in HEK293T cells using PE2.

[0236] FIG. 165 shows screening of nicking guides used in PE3-mediated editing at c.1412. All guides contain the optimal PBS and template lengths identified in FIG. 164 and encode a +1 G-A transition. CDKL5h37 is a pegRNA, and the remaining guides are all epegRNAs that contain different RNA structural motifs 3′ of the PBS via an 8-nucleotide linker. CDKL5h37 and JNpeg953 showed the highest editing efficiency.

### DEFINITIONS

[0237] Unless defined otherwise, all technical and scientific terms used herein have the meaning commonly understood by a person skilled in the art to which this invention belongs. The following references provide one of skill with a general definition of many of the terms used in this invention: Singleton et al., Dictionary of Microbiology and Molecular Biology (2nd ed. 1994); The Cambridge Dictionary of Science and Technology (Walker ed., 1988); The Glossary of Genetics, 5th Ed., R. Rieger et al. (eds.), Springer Verlag (1991); and Hale & Marham, The Harper Collins Dictionary of Biology (1991). As used herein, the following terms have the meanings ascribed to them unless specified otherwise.

### Antisense Strand

[0238] In genetics, the “antisense” strand of a segment within double-stranded DNA is the template strand, and which is considered to run in the 3′ to 5′ orientation. By contrast, the “sense” strand is the segment within double-stranded DNA that runs from 5′ to 3′, and which is complementary to the antisense strand of DNA, or template strand, which runs from 3′ to 5′. In the case of a DNA segment that encodes a protein, the sense strand is the strand of DNA that has the same sequence as the mRNA, which takes the antisense strand as its template during transcription, and eventually undergoes (typically, not always) translation into a protein. The antisense strand is thus responsible for the RNA that is later translated to protein, while the sense strand possesses a nearly identical makeup to that of the mRNA. Note that for each segment of dsDNA, there will possibly be two sets of sense and antisense, depending on which direction one reads (since sense and antisense is relative to perspective). It is ultimately the gene product, or mRNA, that dictates which strand of one segment of dsDNA is referred to as sense or antisense.

### Aptamer

[0239] An “aptamer” refers to an oligonucleotide or peptide molecule that binds to a specific target molecule. Aptamers include DNA or RNA aptamers that are short single-stranded DNA- or RNA-based oligonucleotides that can selectively bind to small molecular ligands or protein targets with high affinity and specificity, when folded into their unique three-dimensional structures. On the molecular level, aptamers bind to its cognate target through various non-covalent interactions, electrostatic interactions, hydrophobic interactions, and induced fitting. Further reference can be made to Ku et al., “Nucleic Acid Aptamers: An Emerging Tool for Biotechnology and Biomedical Sensing,” Sensors, 2015, 15(7): 16281-16313. The present disclosure contemplates the use of any aptamer, including those obtained from commercial sources. For example, numerous aptamers may be obtained from APTAGEN (www.aptagen.com) and include, but are not limited to, thrombin (15mer), HIV-1 TAR RNA hairpin loop (B22-19), human immunoglobulin G (IgG) (Apt 8), reactive green 19 (GR-30), abrin toxin (TA6), malachite green (MG-4), PSMA aptamer (A10-3), tenascin-C (GBI-10), and methylenedianiline (M1). Another example is prequeosine₁-1 riboswitch aptamer-one of the smallest natural tertiary RNA structures (also known as evopreQ₁-1).

### Cas9

[0240] The term “Cas9” or “Cas9 nuclease” refers to an RNA-guided nuclease comprising a Cas9 domain, or a fragment thereof (e.g., a protein comprising an active or inactive DNA cleavage domain of Cas9, and/or the gRNA binding domain of Cas9). A “Cas9 domain” as used herein, is a protein fragment comprising an active or inactive cleavage domain of Cas9 and/or the gRNA binding domain of Cas9. A “Cas9 protein” is a full length Cas9 protein. A Cas9 nuclease is also referred to sometimes as a casn1 nuclease or a CRISPR (Clustered Regularly Interspaced Short Palindromic Repeat)-associated nuclease. CRISPR is an adaptive immune system that provides protection against mobile genetic elements (viruses, transposable elements, and conjugative plasmids). CRISPR clusters contain spacers, sequences complementary to antecedent mobile elements, and target invading nucleic acids. CRISPR clusters are transcribed and processed into CRISPR RNA (crRNA). In type II CRISPR systems, correct processing of pre-crRNA requires a trans-encoded small RNA (tracrRNA), endogenous ribonuclease 3 (mc), and a Cas9 domain. The tracrRNA serves as a guide for ribonuclease 3-aided processing of pre-crRNA. Subsequently, Cas9/crRNA/tracrRNA endonucleolytically cleaves a linear or circular dsDNA target complementary to the spacer. The target strand not complementary to crRNA is first cut endonucleolytically, then trimmed 3′-5′ exonucleolytically. In nature, DNA-binding and cleavage typically requires protein and both RNAs. However, single guide RNAs (“sgRNA”, or simply “gRNA”) can be engineered so as to incorporate aspects of both the crRNA and tracrRNA into a single RNA species. See, e.g., Jinek M., Chylinski K., Fonfara I., Hauer M., Doudna J. A., Charpentier E. Science 337:816-821(2012), the entire contents of which are hereby incorporated by reference. Cas9 recognizes a short motif in the CRISPR repeat sequences (the PAM or protospacer adjacent motif) to help distinguish self versus non-self. Cas9 nuclease sequences and structures are well known to those of skill in the art (see, e.g., “Complete genome sequence of an M1 strain of Streptococcus pyogenes.” Ferretti et al., J. J., McShan W. M., Ajdic D. J., Savic D. J., Savic G., Lyon K., Primeaux C., Sezate S., Suvorov A. N., Kenton S., Lai H. S., Lin S. P., Qian Y., Jia H. G., Najar F. Z., Ren Q., Zhu H., Song L., White J., Yuan X., Clifton S. W., Roe B. A., McLaughlin R. E., Proc. Natl. Acad. Sci. U.S.A. 98:4658-4663(2001); “CRISPR RNA maturation by trans-encoded small RNA and host factor RNase III.” Deltcheva E., Chylinski K., Sharma C. M., Gonzales K., Chao Y., Pirzada Z. A., Eckert M. R., Vogel J., Charpentier E., Nature 471:602-607(2011); and “A programmable dual-RNA-guided DNA endonuclease in adaptive bacterial immunity.” Jinek M., Chylinski K., Fonfara I., Hauer M., Doudna J. A., Charpentier E. Science 337:816-821(2012), the entire contents of each of which are incorporated herein by reference). Cas9 orthologs have been described in various species, including, but not limited to, S. pyogenes and S. thermophilus. Additional suitable Cas9 nucleases and sequences will be apparent to those of skill in the art based on this disclosure, and such Cas9 nucleases and sequences include Cas9 sequences from the organisms and loci disclosed in Chylinski, Rhun, and Charpentier, “The tracrRNA and Cas9 families of type II CRISPR-Cas immunity systems” (2013) RNA Biology 10:5, 726-737; the entire contents of which are incorporated herein by reference. In some embodiments, a Cas9 nuclease comprises one or more mutations that partially impair or inactivate the DNA cleavage domain.

[0241] A nuclease-inactivated Cas9 domain may interchangeably be referred to as a “dCas9” protein (for nuclease-“dead” Cas9). Methods for generating a Cas9 domain (or a fragment thereof) having an inactive DNA cleavage domain are known (see, e.g., Jinek et al., Science. 337:816-821(2012); Qi et al., “Repurposing CRISPR as an RNA-Guided Platform for Sequence-Specific Control of Gene Expression” (2013) Cell. 28; 152(5):1173-83, the entire contents of each of which are incorporated herein by reference). For example, the DNA cleavage domain of Cas9 is known to include two subdomains, the HNH nuclease subdomain and the RuvC1 subdomain. The HNH subdomain cleaves the strand complementary to the gRNA, whereas the RuvC1 subdomain cleaves the non-complementary strand. Mutations within these subdomains can silence the nuclease activity of Cas9. For example, the mutations D10A and H840A completely inactivate the nuclease activity of S. pyogenes Cas9 (Jinek et al., Science. 337:816-821(2012); Qi et al., Cell. 28; 152(5):1173-83 (2013)). In some embodiments, proteins comprising fragments of Cas9 are provided. For example, in some embodiments, a protein comprises one of two Cas9 domains: (1) the gRNA binding domain of Cas9; or (2) the DNA cleavage domain of Cas9. In some embodiments, proteins comprising Cas9 or fragments thereof are referred to as “Cas9 variants.” A Cas9 variant shares homology to Cas9, or a fragment thereof. For example, a Cas9 variant is at least about 70% identical, at least about 80% identical, at least about 90% identical, at least about 95% identical, at least about 96% identical, at least about 97% identical, at least about 98% identical, at least about 99% identical, at least about 99.5% identical, at least about 99.8% identical, or at least about 99.9% identical to wild type Cas9 (e.g., SpCas9 of SEQ ID NO: 37). In some embodiments, the Cas9 variant may have 1, 2, 3, 4, 5, 6, 7, 8, 9, 10, 11, 12, 13, 14, 15, 16, 17, 18, 19, 20, 21, 22, 21, 24, 25, 26, 27, 28, 29, 30, 31, 32, 33, 34, 35, 36, 37, 38, 39, 40, 41, 42, 43, 44, 45, 46, 47, 48, 49, 50, or more amino acid changes compared to wild type Cas9 (e.g., SpCas9 of SEQ ID NO: 37). In some embodiments, the Cas9 variant comprises a fragment of SEQ ID NO: 37 Cas9 (e.g., a gRNA binding domain or a DNA-cleavage domain), such that the fragment is at least about 70% identical, at least about 80% identical, at least about 90% identical, at least about 95% identical, at least about 96% identical, at least about 97% identical, at least about 98% identical, at least about 99% identical, at least about 99.5% identical, or at least about 99.9% identical to the corresponding fragment of wild type Cas9 (e.g., SpCas9 of SEQ ID NO: 37). In some embodiments, the fragment is at least 30%, at least 35%, at least 40%, at least 45%, at least 50%, at least 55%, at least 60%, at least 65%, at least 70%, at least 75%, at least 80%, at least 85%, at least 90%, at least 95% identical, at least 96%, at least 97%, at least 98%, at least 99%, or at least 99.5% of the amino acid length of a corresponding wild type Cas9 (e.g., SpCas9 of SEQ ID NO: 37).

cDNA

[0242] The term “cDNA” refers to a strand of DNA copied from an RNA template. cDNA is complementary to the RNA template.

### Circular Permutant

[0243] As used herein, the term “circular permutant” refers to a protein or polypeptide (e.g., a Cas9) comprising a circular permutation, which is a change in the protein's structural configuration involving a change in the order of amino acids appearing in the protein's amino acid sequence. In other words, circular permutants are proteins that have altered N- and C-termini as compared to a wild-type counterpart, e.g., the wild-type C-terminal half of a protein becomes the new N-terminal half. Circular permutation (or CP) is essentially the topological rearrangement of a protein's primary sequence, connecting its N- and C-terminus, often with a peptide linker, while concurrently splitting its sequence at a different position to create new, adjacent N- and C-termini. The result is a protein structure with different connectivity, but which often can have the same overall similar three-dimensional (3D) shape, and possibly include improved or altered characteristics, including reduced proteolytic susceptibility, improved catalytic activity, altered substrate or ligand binding, and/or improved thermostability. Circular permutant proteins can occur in nature (e.g., concanavalin A and lectin). In addition, circular permutation can occur as a result of posttranslational modifications or may be engineered using recombinant techniques.

### Circularly Permuted Cas9

[0244] The term “circularly permuted Cas9” refers to any Cas9 protein, or variant thereof, that occurs as a circular permutant, whereby its N- and C-termini have been topically rearranged. Such circularly permuted Cas9 proteins (“CP-Cas9”), or variants thereof, retain the ability to bind DNA when complexed with a guide RNA (gRNA). See, Oakes et al., “Protein Engineering of Cas9 for enhanced function,” Methods Enzymol, 2014, 546: 491-511 and Oakes et al., “CRISPR-Cas9 Circular Permutants as Programmable Scaffolds for Genome Modification,” Cell, Jan. 10, 2019, 176: 254-267, each of which are incorporated herein by reference. The instant disclosure contemplates any previously known CP-Cas9 or use of a new CP-Cas9 so long as the resulting circularly permuted protein retains the ability to bind DNA when complexed with a guide RNA (gRNA). Exemplary CP-Cas9 proteins are SEQ ID NOs: 88-97.

### CRISPR

[0245] CRISPR is a family of DNA sequences (i.e., CRISPR clusters) in bacteria and archaea that represent snippets of prior infections by a virus that have invaded the prokaryote. The snippets of DNA are used by the prokaryotic cell to detect and destroy DNA from subsequent attacks by similar viruses and effectively compose, along with an array of CRISPR-associated proteins (including Cas9 and homologs thereof) and CRISPR-associated RNA, a prokaryotic immune defense system. In nature, CRISPR clusters are transcribed and processed into CRISPR RNA (crRNA). In certain types of CRISPR systems (e.g., type II CRISPR systems), correct processing of pre-crRNA requires a trans-encoded small RNA (tracrRNA), endogenous ribonuclease 3 (mc) and a Cas9 protein. The tracrRNA serves as a guide for ribonuclease 3-aided processing of pre-crRNA. Subsequently, Cas9/crRNA/tracrRNA endonucleolytically cleaves a linear or circular dsDNA target complementary to the RNA. Specifically, the target strand not complementary to crRNA is first cut endonucleolytically, then trimmed 3′-5′ exonucleolytically. In nature, DNA-binding and cleavage typically requires protein and both RNAs. However, single guide RNAs (“sgRNA”, or simply “gNRA”) can be engineered so as to incorporate aspects of both the crRNA and tracrRNA into a single RNA species—the guide RNA. See, e.g., Jinek M., Chylinski K., Fonfara I., Hauer M., Doudna J. A., Charpentier E. Science 337:816-821(2012), the entire contents of which is hereby incorporated by reference. Cas9 recognizes a short motif in the CRISPR repeat sequences (the PAM or protospacer adjacent motif) to help distinguish self versus non-self. CRISPR biology, as well as Cas9 nuclease sequences and structures are well known to those of skill in the art (see, e.g., “Complete genome sequence of an M1 strain of Streptococcus pyogenes.” Ferretti et al., J. J., McShan W. M., Ajdic D. J., Savic D. J., Savic G., Lyon K., Primeaux C., Sezate S., Suvorov A. N., Kenton S., Lai H. S., Lin S. P., Qian Y., Jia H. G., Najar F. Z., Ren Q., Zhu H., Song L., White J., Yuan X., Clifton S. W., Roe B. A., McLaughlin R. E., Proc. Natl. Acad. Sci. U.S.A. 98:4658-4663(2001); “CRISPR RNA maturation by trans-encoded small RNA and host factor RNase III.” Deltcheva E., Chylinski K., Sharma C. M., Gonzales K., Chao Y., Pirzada Z. A., Eckert M. R., Vogel J., Charpentier E., Nature 471:602-607(2011); and “A programmable dual-RNA-guided DNA endonuclease in adaptive bacterial immunity.” Jinek M., Chylinski K., Fonfara I., Hauer M., Doudna J. A., Charpentier E. Science 337:816-821(2012), the entire contents of each of which are incorporated herein by reference). Cas9 orthologs have been described in various species, including, but not limited to, S. pyogenes and S. thermophilus. Additional suitable Cas9 nucleases and sequences will be apparent to those of skill in the art based on this disclosure, and such Cas9 nucleases and sequences include Cas9 sequences from the organisms and loci disclosed in Chylinski, Rhun, and Charpentier, “The tracrRNA and Cas9 families of type II CRISPR-Cas immunity systems” (2013) RNA Biology 10:5, 726-737; the entire contents of which are incorporated herein by reference.

[0246] In certain types of CRISPR systems (e.g., type II CRISPR systems), correct processing of pre-crRNA requires a trans-encoded small RNA (tracrRNA), endogenous ribonuclease 3 (mc), and a Cas9 protein. The tracrRNA serves as a guide for ribonuclease 3-aided processing of pre-crRNA. Subsequently, Cas9/crRNA/tracrRNA endonucleolytically cleaves a linear or circular nucleic acid target complementary to the RNA. Specifically, the target strand not complementary to crRNA is first cut endonucleolytically, then trimmed 3′-5′ exonucleolytically. In nature, DNA-binding and cleavage typically requires protein and both RNAs. However, single guide RNAs (“sgRNA”, or simply “gRNA”) can be engineered so as to incorporate embodiments of both the crRNA and tracrRNA into a single RNA species—the guide RNA.

[0247] In general, a “CRISPR system” refers collectively to transcripts and other elements involved in the expression of or directing the activity of CRISPR-associated (“Cas”) genes, including sequences encoding a Cas gene, a tracr (trans-activating CRISPR) sequence (e.g. tracrRNA or an active partial tracrRNA), a tracr mate sequence (encompassing a “direct repeat” and a tracrRNA-processed partial direct repeat in the context of an endogenous CRISPR system), a guide sequence (also referred to as a “spacer” in the context of an endogenous CRISPR system), or other sequences and transcripts from a CRISPR locus. The tracrRNA of the system is complementary (fully or partially) to the tracr mate sequence present on the guide RNA.

### DNA Synthesis Template

[0248] As used herein, the term “DNA synthesis template” refers to the region or portion of the extension arm of a pegRNA that is utilized as a template strand by a polymerase of a prime editor to encode a 3′ single-strand DNA flap that contains the desired edit and which then, through the mechanism of prime editing, replaces the corresponding endogenous strand of DNA at the target site. In various embodiments, the DNA synthesis template is shown in FIG. 3A (in the context of a pegRNA comprising a 5′ extension arm), FIG. 3B (in the context of a pegRNA comprising a 3′ extension arm), FIG. 3C (in the context of an internal extension arm), FIG. 3D (in the context of a 3′ extension arm), and FIG. 3E (in the context of a 5′ extension arm). The extension arm, including the DNA synthesis template, may be comprised of DNA or RNA. In the case of RNA, the polymerase of the prime editor can be an RNA-dependent DNA polymerase (e.g., a reverse transcriptase). In the case of DNA, the polymerase of the prime editor can be a DNA-dependent DNA polymerase. In various embodiments (e.g., as depicted in FIGS. 3D-3E), the DNA synthesis template comprises an the “edit template” and a “homology arm.” In various embodiments (e.g., as depicted in FIGS. 3D-3E), the DNA synthesis template (4) may comprise the “edit template” and a “homology arm”, and all or a portion of the optional 5′ end modifier region, e2. That is, depending on the nature of the e2 region (e.g., whether it includes a hairpin, toeloop, or stem/loop secondary structure), the polymerase may encode none, some, or all of the e2 region, as well. Said another way, in the case of a 3′ extension arm, the DNA synthesis template (3) can include the portion of the extension arm (3) that spans from the 5′ end of the primer binding site (PBS) to 3′ end of the gRNA core that may operate as a template for the synthesis of a single-strand of DNA by a polymerase (e.g., a reverse transcriptase). In the case of a 5′ extension arm, the DNA synthesis template (3) can include the portion of the extension arm that spans from the 5′ end of the pegRNA molecule to the 3′ end of the edit template. In some embodiments, the DNA synthesis template excludes the primer binding site (PBS) of pegRNAs either having a 3′ extension arm or a 5′ extension arm. Certain embodiments described here (e.g., FIG. 71A) refer to an “RT template,” which is inclusive of the edit template and the homology arm, i.e., the sequence of the pegRNA extension arm which is actually used as a template during DNA synthesis. The term “RT template” is equivalent to the term “DNA synthesis template.” In certain embodiments, an RT template may be used to refer to a template polynucleotide for reverse transcription, e.g., in a prime editing system, complex or method using a prime editor having a polymerase that is a reverse transcriptase. In some embodiments, a DNA synthesis template may be used to refer to a template polynucleotide for DNA polymerization, e.g., RNA-dependent DNA polymerization or DNA-dependent polymerization, e.g., in a prime editing system, complex or method using a prime editor having a polymerase that is an RNA-dependent DNA polymerase or a DNA-dependent DNA polymerase.

[0249] In the case of trans prime editing (e.g., FIG. 3G and FIG. 3H), the primer binding site (PBS) and the DNA synthesis template can be engineered into a separate molecule referred to as a trans prime editor RNA template (tPERT).

[0250] In some embodiments, the DNA synthesis template is a single-stranded portion of the PEgRNA that is 5′ of the PBS and comprises a region of complementarity to the PAM strand (i.e., the non-target strand or the edit strand), and comprises one or more nucleotide edits compared to the endogenous sequence of the double stranded target DNA. In some embodiments, the DNA synthesis template is complementary or substantially complementary to a sequence on the non-target strand that is downstream of a nick site, except for one or more non-complementary nucleotides at the intended nucleotide edit positions. In some embodiments, the DNA synthesis template is complementary or substantially complementary to a sequence on the non-target strand that is immediately downstream (i.e., directly downstream) of a nick site, except for one or more non-complementary nucleotides at the intended nucleotide edit positions. In some embodiments, one or more of the non-complementary nucleotides at the intended nucleotide edit positions are immediately downstream of a nick site. In some embodiments, the DNA synthesis template comprises one or more nucleotide edits relative to the double-stranded target DNA sequence. In some embodiments, the DNA synthesis template comprises one or more nucleotide edits relative to the non-target strand of the double-stranded target DNA sequence. For each PEgRNA described herein, a nick site is characteristic of the particular napDNAbp to which the gRNA core of the PEgRNA associates with, and is characteristic of the particular PAM required for recognition and function of the napDNAbp. For example, for a PEgRNA that comprises a gRNA core that associates with a SpCas9, the nick site in the phosphodiester bond between bases three (“−3” position relative to the position 1 of the PAM sequence) and four (“−4” position relative to position 1 of the PAM sequence). In some embodiments, the DNA synthesis template and the primer binding site are immediately adjacent to each other. The terms “nucleotide edit”, “nucleotide change”, “desired nucleotide change”, and “desired nucleotide edit” are used interchangeably to refer to a specific nucleotide edit, e.g., a specific deletion of one or more nucleotides, a specific insertion of one or more nucleotides, a specific substitution(s) of one or more nucleotides, or a combination thereof, at one a specific position in a DNA synthesis template of a PEgRNA to be incorporated in a target DNA sequence. In some embodiments, the DNA synthesis template comprises more than one nucleotide edits relative to the double-stranded target DNA sequence. In such embodiments, each nucleotide edit is a specific nucleotide edit at a specific position in the DNA synthesis template, each nucleotide edit is at a different specific position relative to any of the other nucleotide edits in the DNA synthesis template, and each nucleotide edit is independently selected from a specific deletion of one or more nucleotides, a specific insertion of one or more nucleotides, a specific substitution(s) of one or more nucleotides, or a combination thereof. A nucleotide edit may refer to the edit on the DNA synthesis template as compared to the sequence on the target strand of the target gene, or may refer to the edit encoded by the DNA synthesis template on the newly synthesized single stranded DNA that replaces the endogenous target DNA sequence on the non-target strand, in either case, may be refer to as a nucleotide edit compared to the target DNA sequence.

### Downstream

[0251] As used herein, the terms “upstream” and “downstream” are terms of relativity that define the linear position of at least two elements located in a nucleic acid molecule (whether single or double-stranded) that is orientated in a 5′-to-3′ direction. In particular, a first element is upstream of a second element in a nucleic acid molecule where the first element is positioned somewhere that is 5′ to the second element. For example, a SNP is upstream of a Cas9-induced nick site if the SNP is on the 5′ side of the nick site. Conversely, a first element is downstream of a second element in a nucleic acid molecule where the first element is positioned somewhere that is 3′ to the second element. For example, a SNP is downstream of a Cas9-induced nick site if the SNP is on the 3′ side of the nick site. The nucleic acid molecule can be a DNA (double or single stranded). RNA (double or single stranded), or a hybrid of DNA and RNA. The analysis is the same for single strand nucleic acid molecule and a double strand molecule since the terms upstream and downstream are in reference to only a single strand of a nucleic acid molecule, except that one needs to select which strand of the double stranded molecule is being considered. Often, the strand of a double stranded DNA which can be used to determine the positional relativity of at least two elements is the “sense” or “coding” strand. In genetics, a “sense” strand is the segment within double-stranded DNA that runs from 5′ to 3′, and which is complementary to the antisense strand of DNA, or template strand, which runs from 3′ to 5′. Thus, as an example, a SNP nucleobase is “downstream” of a promoter sequence in a genomic DNA (which is double-stranded) if the SNP nucleobase is on the 3′ side of the promoter on the sense or coding strand.

### Edit Template

[0252] The term “edit template” refers to a portion of the extension arm that encodes the desired edit in the single strand 3′ DNA flap that is synthesized by the polymerase, e.g., a DNA-dependent DNA polymerase, RNA-dependent DNA polymerase (e.g., a reverse transcriptase). Certain embodiments described here (e.g., FIG. 71A) refer to “an RT template,” which refers to both the edit template and the homology arm together, i.e., the sequence of the pegRNA extension arm which is actually used as a template during DNA synthesis. The term “RT edit template” is also equivalent to the term “DNA synthesis template,” but wherein the RT edit template reflects the use of a prime editor having a polymerase that is a reverse transcriptase, and wherein the DNA synthesis template reflects more broadly the use of a prime editor having any polymerase.

### Effective Amount

[0253] The term “effective amount,” as used herein, refers to an amount of a biologically active agent that is sufficient to elicit a desired biological response. For example, in some embodiments, an effective amount of a prime editor (PE) may refer to the amount of the editor that is sufficient to edit a target site nucleotide sequence, e.g., a genome. In some embodiments, an effective amount of a prime editor (PE) provided herein, e.g., of a fusion protein comprising a nickase Cas9 domain and a reverse transcriptase may refer to the amount of the fusion protein that is sufficient to induce editing of a target site specifically bound and edited by the fusion protein. As will be appreciated by the skilled artisan, the effective amount of an agent, e.g., a fusion protein, a nuclease, a hybrid protein, a protein dimer, a complex of a protein (or protein dimer) and a polynucleotide, or a polynucleotide, may vary depending on various factors as, for example, on the desired biological response, e.g., on the specific allele, genome, or target site to be edited, on the cell or tissue being targeted, and on the agent being used.

### Error-Prone Reverse Transcriptase

[0254] As used herein, the term “error-prone” reverse transcriptase (or more broadly, any polymerase) refers to a reverse transcriptase (or more broadly, any polymerase) that occurs naturally or which has been derived from another reverse transcriptase (e.g., a wild type M-MLV reverse transcriptase) which has an error rate that is less than the error rate of wild type M-MLV reverse transcriptase. The error rate of wild type M-MLV reverse transcriptase is reported to be in the range of one error in 15,000 (higher) to 27,000 (lower). An error rate of 1 in 15,000 corresponds with an error rate of 6.7×10⁻⁵. An error rate of 1 in 27,000 corresponds with an error rate of 3.7×10⁻⁵. See Boutabout et al. (2001) “DNA synthesis fidelity by the reverse transcriptase of the yeast retrotransposon Ty1,” Nucleic Acids Res 29(11):2217-2222, which is incorporated herein by reference. Thus, for purposes of this application, the term “error prone” refers to those RT that have an error rate that is greater than one error in 15,000 nucleobase incorporation (6.7×10⁻⁵ or higher), e.g., 1 error in 14,000 nucleobases (7.14×10⁻⁵ or higher), 1 error in 13,000 nucleobases or fewer (7.7×10⁻⁵ or higher), 1 error in 12,000 nucleobases or fewer (7.7×10⁻⁵ or higher), 1 error in 11,000 nucleobases or fewer (9.1×10⁻⁵ or higher), 1 error in 10,000 nucleobases or fewer (1×10⁻⁴ or 0.0001 or higher), 1 error in 9,000 nucleobases or fewer (0.00011 or higher), 1 error in 8,000 nucleobases or fewer (0.00013 or higher) 1 error in 7,000 nucleobases or fewer (0.00014 or higher), 1 error in 6,000 nucleobases or fewer (0.00016 or higher), 1 error in 5,000 nucleobases or fewer (0.0002 or higher), 1 error in 4,000 nucleobases or fewer (0.00025 or higher), 1 error in 3,000 nucleobases or fewer (0.00033 or higher), 1 error in 2,000 nucleobase or fewer (0.00050 or higher), or 1 error in 1,000 nucleobases or fewer (0.001 or higher), or 1 error in 500 nucleobases or fewer (0.002 or higher), or 1 error in 250 nucleobases or fewer (0.004 or higher).

### Extein

[0255] The term “extein,” as used herein, refers to a polypeptide sequence that is flanked by an intein and is ligated to another extein during the process of protein splicing to form a mature, spliced protein. Typically, an intein is flanked by two extein sequences that are ligated together when the intein catalyzes its own excision. Exteins, accordingly, are the protein analog to exons found in mRNA. For example, a polypeptide comprising an intein may be of the structure extein(N)—intein—extein(C). After excision of the intein and splicing of the two exteins, the resulting structures are extein(N)—extein(C) and a free intein. In various configurations, the exteins may be separate proteins (e.g., half of a Cas9 or Prime editor), each fused to a split-intein, wherein the excision of the split inteins causes the splicing together of the extein sequences.

### Extension Arm

[0256] The term “extension arm” refers to a nucleotide sequence component of a pegRNA which comprises a primer binding site and a DNA synthesis template (e.g., an edit template and a homology arm) for a polymerase (e.g., a reverse transcriptase). In some embodiments, e.g., FIG. 3D, the extension arm is located at the 3′ end of the guide RNA. In other embodiments, e.g., FIG. 3E, the extension arm is located at the 5′ end of the guide RNA. In some embodiments, the extension arm comprises a DNA synthesis template and a primer binding site. In some embodiments, the extension arm comprises the following components in a 5′ to 3′ direction: the DNA synthesis template, and the primer binding site. In some embodiments, the extension arm also includes a homology arm. In various embodiments, the extension arm comprises the following components in a 5′ to 3′ direction: the homology arm, the edit template, and the primer binding site. Since polymerization activity of the reverse transcriptase is in the 5′ to 3′ direction, the preferred arrangement of the homology arm, edit template, and primer binding site is in the 5′ to 3′ direction such that the reverse transcriptase, once primed by an annealed primer sequence, polymerizes a single strand of DNA using the edit template as a complementary template strand.

[0257] Further details, such as the length of the extension arm, are described elsewhere herein.

[0258] The extension arm may also be described as comprising generally two regions: a primer binding site (PBS) and a DNA synthesis template, as shown in FIG. 3G (top), for instance. The primer binding site binds to the primer sequence that is formed from the endogenous DNA strand of the target site when it becomes nicked by the prime editor complex, thereby exposing a 3′ end on the endogenous nicked strand. As explained herein, the binding of the primer sequence to the primer binding site on the extension arm of the pegRNA creates a duplex region with an exposed 3′ end (i.e., the 3′ of the primer sequence), which then provides a substrate for a polymerase to begin polymerizing a single strand of DNA from the exposed 3′ end along the length of the DNA synthesis template. The sequence of the single strand DNA product is the complement of the DNA synthesis template. Polymerization continues towards the 5′ of the DNA synthesis template (or extension arm) until polymerization terminates. Thus, the DNA synthesis template represents the portion of the extension arm that is encoded into a single strand DNA product (i.e., the 3′ single strand DNA flap containing the desired genetic edit information) by the polymerase of the prime editor complex and which ultimately replaces the corresponding endogenous DNA strand of the target site that sits immediately downstream of the PE-induced nick site. Without being bound by theory, polymerization of the DNA synthesis template continues towards the 5′ end of the extension arm until a termination event. Polymerization may terminate in a variety of ways, including, but not limited to (a) reaching a 5′ terminus of the pegRNA (e.g., in the case of the 5′ extension arm wherein the DNA polymerase simply runs out of template), (b) reaching an impassable RNA secondary structure (e.g., hairpin or stem/loop), or (c) reaching a replication termination signal, e.g., a specific nucleotide sequence that blocks or inhibits the polymerase, or a nucleic acid topological signal, such as, supercoiled DNA or RNA.

### Flap Endonuclease (e.g., FEN1)

[0259] As used herein, the term “flap endonuclease” refers to an enzyme that catalyzes the removal of 5′ single strand DNA flaps. These are enzymes that process the removal of 5′ flaps formed during cellular processes, including DNA replication. The prime editing methods herein described may utilize endogenously supplied flap endonucleases or those provided in trans to remove the 5′ flap of endogenous DNA formed at the target site during prime editing. Flap endonucleases are known in the art and can be found described in Patel et al., “Flap endonucleases pass 5′-flaps through a flexible arch using a disorder-thread-order mechanism to confer specificity for free 5′-ends,” Nucleic Acids Research, 2012, 40(10): 4507-4519, Tsutakawa et al., “Human flap endonuclease structures, DNA double-base flipping, and a unified understanding of the FEN1 superfamily,” Cell, 2011, 145(2): 198-211, and Balakrishnan et al., “Flap Endonuclease 1,” Annu Rev Biochem, 2013, Vol 82: 119-138 (each of which are incorporated herein by reference). An exemplary flap endonuclease is FEN1, which can be represented by the following amino acid sequence:

| DE- | | SEQ ID |
|---|---|---|
| SCRIPTION | SEQUENCE | NO: |
| FEN1 | MGIQGLAKLIADVAPSAIRENDIKSYFGRKVAIDA | SEQ ID |
| WILD | SMSIYQFLIAVRQGGDVLQNEEGETTSHLMGMFYR | NO: 15 |
| TYPE | TIRMMENGIKPVYVFDGKPPQLKSGELAKRSERRA | |
| | EAEKQLQQAQAAGAEQEVEKFTKRLVKVTKQHNDE | |
| | CKHLLSLMGIPYLDAPSEAEASCAALVKAGKVYAA | |
| | ATEDMDCLTFGSPVLMRHLTASEAKKLPIQEFHLS | |
| | RILQELGLNQEQFVDLCILLGSDYCESIRGIGPKR | |
| | AVDLIQKHKSIEEIVRRLDPNKYPVPENWLHKEAH | |
| | QLFLEPEVLDPESVELKWSEPNEEELIKFMCGEKQ | |
| | FSEERIRSGVKRLSKSRQGSTQGRLDDFFKVTGSL | |
| | SSAKRKEPEPKGSTKKKAKTGAAGKFKRGK | |

### Functional Equivalent

[0260] The term “functional equivalent” refers to a second biomolecule that is equivalent in function, but not necessarily equivalent in structure to a first biomolecule. For example, a “Cas9 equivalent” refers to a protein that has the same or substantially the same functions as Cas9, but not necessarily the same amino acid sequence. In the context of the disclosure, the specification refers throughout to “a protein X, or a functional equivalent thereof.” In this context, a “functional equivalent” of protein X embraces any homolog, paralog, fragment, naturally occurring, engineered, mutated, or synthetic version of protein X which bears an equivalent function.

### Fusion Protein

[0261] The term “fusion protein” as used herein refers to a hybrid polypeptide which comprises protein domains from at least two different proteins. One protein may be located at the amino-terminal (N-terminal) portion of the fusion protein or at the carboxy-terminal (C-terminal) protein thus forming an “amino-terminal fusion protein” or a “carboxy-terminal fusion protein,” respectively. A protein may comprise different domains, for example, a nucleic acid binding domain (e.g., the gRNA binding domain of Cas9 that directs the binding of the protein to a target site) and a nucleic acid cleavage domain or a catalytic domain of a nucleic-acid editing protein. Another example includes a Cas9 or equivalent thereof to a reverse transcriptase. Any of the proteins provided herein may be produced by any method known in the art. For example, the proteins provided herein may be produced via recombinant protein expression and purification, which is especially suited for fusion proteins comprising a peptide linker. Methods for recombinant protein expression and purification are well known, and include those described by Green and Sambrook, Molecular Cloning: A Laboratory Manual (4^{th} ed., Cold Spring Harbor Laboratory Press, Cold Spring Harbor, N.Y. (2012)), the entire contents of which are incorporated herein by reference.

### Gene of Interest (GOI)

[0262] The term “gene of interest” or “GOI” refers to a gene that encodes a biomolecule of interest (e.g., a protein or an RNA molecule). A protein of interest can include any intracellular protein, membrane protein, or extracellular protein, e.g., a nuclear protein, transcription factor, nuclear membrane transporter, intracellular organelle associated protein, a membrane receptor, a catalytic protein, and enzyme, a therapeutic protein, a membrane protein, a membrane transport protein, a signal transduction protein, or an immunological protein (e.g., an IgG or other antibody protein), etc. The gene of interest may also encode an RNA molecule, including, but not limited to, messenger RNA (mRNA), transfer RNA (tRNA), ribosomal RNA (rRNA), small nuclear RNA (snRNA), antisense RNA, guide RNA, microRNA (miRNA), small interfering RNA (siRNA), and cell-free RNA (cfRNA).

Guide RNA (“gRNA”)

[0263] As used herein, the term “guide RNA” is a particular type of guide nucleic acid which is mostly commonly associated with a Cas protein of a CRISPR-Cas9 and which associates with Cas9, directing the Cas9 protein to a specific sequence in a DNA molecule that includes complementarity to the protospacer sequence of the guide RNA. However, this term also embraces the equivalent guide nucleic acid molecules that associate with Cas9 equivalents, homologs, orthologs, or paralogs, whether naturally occurring or non-naturally occurring (e.g., engineered or recombinant), and which otherwise program the Cas9 equivalent to localize to a specific target nucleotide sequence. The Cas9 equivalents may include other napDNAbp from any type of CRISPR system (e.g., type II, V, VI), including Cpf1 (a type-V CRISPR-Cas systems), C2c1 (a type V CRISPR-Cas system), C2c2 (a type VI CRISPR-Cas system) and C2c3 (a type V CRISPR-Cas system). Further Cas-equivalents are described in Makarova et al., “C2c2 is a single-component programmable RNA-guided RNA-targeting CRISPR effector,” Science 2016; 353(6299), the contents of which are incorporated herein by reference. Exemplary sequences are and structures of guide RNAs are provided herein. In addition, methods for designing appropriate guide RNA sequences are provided herein. As used herein, the “guide RNA” may also be referred to as a “traditional guide RNA” to contrast it with the modified forms of guide RNA termed “prime editing guide RNAs” (or “pegRNAs”) which have been invented for the prime editing methods and composition disclosed herein.

[0264] Guide RNAs or pegRNAs may comprise various structural elements that include, but are not limited to:

[0265] Spacer sequence—the sequence in the guide RNA or pegRNA (having about 20 nts in length) which binds to the protospacer in the target DNA.

[0266] gRNA core (or gRNA scaffold or backbone sequence)—refers to the sequence within the gRNA that is responsible for Cas9 binding, it does not include the 20 bp spacer/targeting sequence that is used to guide Cas9 to target DNA.

[0267] Extension arm—a single strand extension at the 3′ end or the 5′ end of the pegRNA which comprises a primer binding site and a DNA synthesis template sequence that encodes via a polymerase (e.g., a reverse transcriptase) a single stranded DNA flap containing the genetic change of interest, which then integrates into the endogenous DNA by replacing the corresponding endogenous strand, thereby installing the desired genetic change.

[0268] Transcription terminator—the guide RNA or pegRNA may comprise a transcriptional termination sequence at the 3′ of the molecule.

### G-Quadruplex

[0269] The term “G-quadruplex” refers to its ordinary and customary meaning. A G-quadruplex is a complex three-dimensional nucleic acid moiety formed in nucleic acid sequences that are rich in guanine (G). They are helical in shape and formed from interconnected stacks of guanine tetrads (or “G-tetrads”), which individually are flat, ring-shaped structures formed from four guanines, and which can be stabilized by the presence of a cation (e.g., potassium) which sits in a central channel between pairs of G-tetrads. G-quadruplexes are a diverse collection of structures and not a single structure. Further reference to G-quadruplexes can be found in (1) Kwok et al., “G-Quadruplexes: Prediction, Characterization, and Biological Application,” Trends in Biotechnology, 2017, Vol. 35(10; pp. 997-1013; (2) Hansel-Hertsch R. et al., “DNA G-quadruplexes in the human genome: detection, functions and therapeutic potential,” Nat. Rev. Mol. Cell Biol., 2017; 18: 279-284; and (3) Millevoi S. et al., “G-quadruplexes in RNA biology,” Wiley Interdiscip. Rev. RNA., 2012; 3: 495-507, each of which are incorporated herein by reference.

### Homology Arm

[0270] The term “homology arm” refers to a portion of the extension arm that encodes a portion of the resulting reverse transcriptase-encoded single strand DNA flap that is to be integrated into the target DNA site by replacing the endogenous strand. The portion of the single strand DNA flap encoded by the homology arm is complementary to the non-edited strand of the target DNA sequence, which facilitates the displacement of the endogenous strand and annealing of the single strand DNA flap in its place, thereby installing the edit. This component is further defined elsewhere. The homology arm is part of the DNA synthesis template since it is by definition encoded by the polymerase of the prime editors described herein.

### Host Cell

[0271] The term “host cell,” as used herein, refers to a cell that can host, replicate, and express a vector described herein, e.g., a vector comprising a nucleic acid molecule encoding a fusion protein comprising a Cas9 or Cas9 equivalent and a reverse transcriptase.

### Inteins

[0272] As used herein, the term “intein” refers to auto-processing polypeptide domains found in organisms from all domains of life. An intein (intervening protein) carries out a unique auto-processing event known as protein splicing in which it excises itself out from a larger precursor polypeptide through the cleavage of two peptide bonds and, in the process, ligates the flanking extein (external protein) sequences through the formation of a new peptide bond. This rearrangement occurs post-translationally (or possibly co-translationally), as intein genes are found embedded in frame within other protein-coding genes. Furthermore, intein-mediated protein splicing is spontaneous; it requires no external factor or energy source, only the folding of the intein domain. This process is also known as cis-protein splicing, as opposed to the natural process of trans-protein splicing with “split inteins.” Inteins are the protein equivalent of the self-splicing RNA introns (see Perler et al., Nucleic Acids Res. 22:1125-1127 (1994)), which catalyze their own excision from a precursor protein with the concomitant fusion of the flanking protein sequences, known as exteins (reviewed in Perler et al., Curr. Opin. Chem. Biol. 1:292-299 (1997); Perler, F. B. Cell 92(1):1-4 (1998); Xu et al., EMBO J. 15(19):5146-5153 (1996)).

[0273] As used herein, the term “protein splicing” refers to a process in which an interior region of a precursor protein (an intein) is excised and the flanking regions of the protein (exteins) are ligated to form the mature protein. This natural process has been observed in numerous proteins from both prokaryotes and eukaryotes (Perler, F. B., Xu, M. Q., Paulus, H. Current Opinion in Chemical Biology 1997, 1, 292-299; Perler, F. B. Nucleic Acids Research 1999, 27, 346-347). The intein unit contains the necessary components needed to catalyze protein splicing and often contains an endonuclease domain that participates in intein mobility (Perler, F. B., Davis, E. O., Dean, G. E., Gimble, F. S., Jack, W. E., Neff, N., Noren, C. J., Thomer, J., Belfort, M. Nucleic Acids Research 1994, 22, 1127-1127). The resulting proteins are linked, however, not expressed as separate proteins. Protein splicing may also be conducted in trans with split inteins expressed on separate polypeptides spontaneously combine to form a single intein which then undergoes the protein splicing process to join to separate proteins.

[0274] The elucidation of the mechanism of protein splicing has led to a number of intein-based applications (Comb, et al., U.S. Pat. No. 5,496,714; Comb, et al., U.S. Pat. No. 5,834,247; Camarero and Muir, J. Amer. Chem. Soc., 121:5597-5598 (1999); Chong, et al., Gene, 192:271-281 (1997), Chong, et al., Nucleic Acids Res., 26:5109-5115 (1998); Chong, et al., J. Biol. Chem., 273:10567-10577 (1998); Cotton, et al. J. Am. Chem. Soc., 121:1100-1101 (1999); Evans, et al., J. Biol. Chem., 274:18359-18363 (1999); Evans, et al., J. Biol. Chem., 274:3923-3926 (1999); Evans, et al., Protein Sci., 7:2256-2264 (1998); Evans, et al., J. Biol. Chem., 275:9091-9094 (2000); Iwai and Pluckthun, FEBS Lett. 459:166-172 (1999); Mathys, et al., Gene, 231:1-13 (1999); Mills, et al., Proc. Natl. Acad. Sci. USA 95:3543-3548 (1998); Muir, et al., Proc. Natl. Acad. Sci. USA 95:6705-6710 (1998); Otomo, et al., Biochemistry 38:16040-16044 (1999); Otomo, et al., J. Biolmol. NMR 14:105-114 (1999); Scott, et al., Proc. Natl. Acad. Sci. USA 96:13638-13643 (1999); Severinov and Muir, J. Biol. Chem., 273:16205-16209 (1998); Shingledecker, et al., Gene, 207:187-195 (1998); Southworth, et al., EMBO J. 17:918-926 (1998); Southworth, et al., Biotechniques, 27:110-120 (1999); Wood, et al., Nat. Biotechnol., 17:889-892 (1999); Wu, et al., Proc. Natl. Acad. Sci. USA 95:9226-9231 (1998a); Wu, et al., Biochim Biophys Acta 1387:422-432 (1998b); Xu, et al., Proc. Natl. Acad. Sci. USA 96:388-393 (1999); Yamazaki, et al., J. Am. Chem. Soc., 120:5591-5592 (1998)). Each reference is incorporated herein by reference.

### Ligand-Dependent Intein

[0275] The term “ligand-dependent intein,” as used herein refers to an intein that comprises a ligand-binding domain. Typically, the ligand-binding domain is inserted into the amino acid sequence of the intein, resulting in a structure intein (N)—ligand-binding domain—intein (C). Typically, ligand-dependent inteins exhibit no or only minimal protein splicing activity in the absence of an appropriate ligand, and a marked increase of protein splicing activity in the presence of the ligand. In some embodiments, the ligand-dependent intein does not exhibit observable splicing activity in the absence of ligand but does exhibit splicing activity in the presence of the ligand. In some embodiments, the ligand-dependent intein exhibits an observable protein splicing activity in the absence of the ligand, and a protein splicing activity in the presence of an appropriate ligand that is at least 5 times, at least 10 times, at least 50 times, at least 100 times, at least 150 times, at least 200 times, at least 250 times, at least 500 times, at least 1000 times, at least 1500 times, at least 2000 times, at least 2500 times, at least 5000 times, at least 10000 times, at least 20000 times, at least 25000 times, at least 50000 times, at least 100000 times, at least 500000 times, or at least 1000000 times greater than the activity observed in the absence of the ligand. In some embodiments, the increase in activity is dose dependent over at least 1 order of magnitude, at least 2 orders of magnitude, at least 3 orders of magnitude, at least 4 orders of magnitude, or at least 5 orders of magnitude, allowing for fine-tuning of intein activity by adjusting the concentration of the ligand. Suitable ligand-dependent inteins are known in the art, and in include those provided below and those described in published U.S. Patent Application U.S. 2014/0065711 A1; Mootz et al., “Protein splicing triggered by a small molecule.” J. Am. Chem. Soc. 2002; 124, 9044-9045; Mootz et al., “Conditional protein splicing: a new tool to control protein structure and function in vitro and in vivo.” J. Am. Chem. Soc. 2003; 125, 10561-10569; Buskirk et al., Proc. Natl. Acad. Sci. USA. 2004; 101, 10505-10510); Skretas & Wood, “Regulation of protein activity with small-molecule-controlled inteins.” Protein Sci. 2005; 14, 523-532; Schwartz, et al., “Post-translational enzyme activation in an animal via optimized conditional protein splicing.” Nat. Chem. Biol. 2007; 3, 50-54; Peck et al., Chem. Biol. 2011; 18 (5), 619-630; the entire contents of each are hereby incorporated by reference. Exemplary sequences are as follows:

| NAME | SEQUENCE OF LIGAND-DEPENDENT INTEIN | SEQ ID NO: |
|---|---|---|
| 2-4 | CLAEGTRIFDPVTGTTHRIEDVVDGRKPIHVVAAAKDGT | SEQ ID NO: 16 |
| INTEIN: | LLARPVVSWFDQGTRDVIGLRIAGGAIVWATPDHKVLTE | |
| | YGWRAAGELRKGDRVAGPGGSGNSLALSLTADQMVSAL | |
| | LDAEPPILYSEYDPTSPFSEASMMGLLTNLADRELVHMIN | |
| | WAKRVPGFVDLTLHDQAHLLECAWLEILMIGLVWRSME | |
| | HPGKLLFAPNLLLDRNQGKCVEGMVEIFDMLLATSSRFR | |
| | MMNLQGEEFVCLKSIILLNSGVYTFLSSTLKSLEEKDHIH | |
| | RALDKITDTLIHLMAKAGLTLQQQHQRLAQLLLILSHIRH | |
| | MSNKGMEHLYSMKYKNVVPLYDLLLEMLDAHRLHAGG | |
| | SGASRVQAFADALDDKFLHDMLAEELRYSVIREVLPTRR | |
| | ARTFDLEVEELHTLVAEGVVVHNC | |
| 3-2 | CLAEGTRIFDPVTGTTHRIEDVVDGRKPIHVVAVAKDGTL | SEQ ID NO: 17 |
| INTEIN | LARPVVSWFDQGTRDVIGLRIAGGAIVWATPDHKVLTEY | |
| | GWRAAGELRKGDRVAGPGGSGNSLALSLTADQMVSALL | |
| | DAEPPILYSEYDPTSPFSEASMMGLLTNLADRELVHMIN | |
| | WAKRVPGFVDLTLHDQAHLLECAWLEILMIGLVWRSME | |
| | HPGKLLFAPNLLLDRNQGKCVEGMVEIFDMLLATSSRFR | |
| | MMNLQGEEFVCLKSIILLNSGVYTFLSSTLKSLEEKDHIH | |
| | RALDKITDTLIHLMAKAGLTLQQQHQRLAQLLLILSHIRH | |
| | MSNKGMEHLYSMKYTNVVPLYDLLLEMLDAHRLHAGG | |
| | SGASRVQAFADALDDKFLHDMLAEELRYSVIREVLPTRR | |
| | ARTFDLEVEELHTLVAEGVVVHNC | |
| 30R3-1 | CLAEGTRIFDPVTGTTHRIEDVVDGRKPIHVVAAAKDGT | SEQ ID NO: 18 |
| INTEIN | LLARPVVSWFDQGTRDVIGLRIAGGATVWATPDHKVLTE | |
| | YGWRAAGELRKGDRVAGPGGSGNSLALSLTADQMVSAL | |
| | LDAEPPIPYSEYDPTSPFSEASMMGLLTNLADRELVHMIN | |
| | WAKRVPGFVDLTLHDQAHLLECAWLEILMIGLVWRSME | |
| | HPGKLLFAPNLLLDRNQGKCVEGMVEIFDMLLATSSRFR | |
| | MMNLQGEEFVCLKSIILLNSGVYTFLSSTLKSLEEKDHIH | |
| | RALDKITDTLIHLMAKAGLTLQQQHQRLAQLLLILSHIRH | |
| | MSNKGMEHLYSMKYKNVVPLYDLLLEMLDAHRLHAGG | |
| | SGASRVQAFADALDDKFLHDMLAEGLRYSVIREVLPTRR | |
| | ARTFDLEVEELHTLVAEGVVVHNC | |
| 30R3-2 | CLAEGTRIFDPVTGTTHRIEDVVDGRKPIHVVAAAKDGT | SEQ ID NO: 19 |
| INTEIN | LLARPVVSWFDQGTRDVIGLRIAGGATVWATPDHKVLTE | |
| | YGWRAAGELRKGDRVAGPGGSGNSLALSLTADQMVSAL | |
| | LDAEPPILYSEYDPTSPFSEASMMGLLTNLADRELVHMIN | |
| | WAKRVPGFVDLTLHDQAHLLECAWLEILMIGLVWRSME | |
| | HPGKLLFAPNLLLDRNQGKCVEGMVEIFDMLLATSSRFR | |
| | MMNLQGEEFVCLKSIILLNSGVYTFLSSTLKSLEEKDHIH | |
| | RALDKITDTLIHLMAKAGLTLQQQHQRLAQLLLILSHIRH | |
| | MSNKGMEHLYSMKYKNVVPLYDLLLEMLDAHRLHAGG | |
| | SGASRVQAFADALDDKFLHDMLAEELRYSVIREVLPTRR | |
| | ARTFDLEVEELHTLVAEGVVVHNC | |
| 30R3-3 | CLAEGTRIFDPVTGTTHRIEDVVDGRKPIHVVAAAKDGT | SEQ ID NO: 20 |
| INTEIN | LLARPVVSWFDQGTRDVIGLRIAGGATVWATPDHKVLTE | |
| | YGWRAAGELRKGDRVAGPGGSGNSLALSLTADQMVSAL | |
| | LDAEPPIPYSEYDPTSPFSEASMMGLLTNLADRELVHMIN | |
| | WAKRVPGFVDLTLHDQAHLLECAWLEILMIGLVWRSME | |
| | HPGKLLFAPNLLLDRNQGKCVEGMVEIFDMLLATSSRFR | |
| | MMNLQGEEFVCLKSIILLNSGVYTFLSSTLKSLEEKDHIH | |
| | RALDKITDTLIHLMAKAGLTLQQQHQRLAQLLLILSHIRH | |
| | MSNKGMEHLYSMKYKNVVPLYDLLLEMLDAHRLHAGG | |
| | SGASRVQAFADALDDKFLHDMLAEELRYSVIREVLPTRR | |
| | ARTFDLEVEELHTLVAEGVVVHNC | |
| 37R3-1 | CLAEGTRIFDPVTGTTHRIEDVVDGRKPIHVVAAAKDGT | SEQ ID NO: 21 |
| INTEIN | LLARPVVSWFDQGTRDVIGLRIAGGATVWATPDHKVLTE | |
| | YGWRAAGELRKGDRVAGPGGSGNSLALSLTADQMVSAL | |
| | LDAEPPILYSEYNPTSPFSEASMMGLLTNLADRELVHMIN | |
| | WAKRVPGFVDLTLHDQAHLLERAWLEILMIGLVWRSME | |
| | HPGKLLFAPNLLLDRNQGKCVEGMVEIFDMLLATSSRFR | |
| | MMNLQGEEFVCLKSIILLNSGVYTFLSSTLKSLEEKDHIH | |
| | RALDKITDTLIHLMAKAGLTLQQQHQRLAQLLLILSHIRH | |
| | MSNKGMEHLYSMKYKNVVPLYDLLLEMLDAHRLHAGG | |
| | SGASRVQAFADALDDKFLHDMLAEGLRYSVIREVLPTRR | |
| | ARTFDLEVEELHTLVAEGVVVHNC | |
| 37R3-2 | CLAEGTRIFDPVTGTTHRIEDVVDGRKPIHVVAAAKDGT | SEQ ID NO: 22 |
| INTEIN | LLARPVVSWFDQGTRDVIGLRIAGGAIVWATPDHKVLTE | |
| | YGWRAAGELRKGDRVAGPGGSGNSLALSLTADQMVSAL | |
| | LDAEPPILYSEYDPTSPFSEASMMGLLTNLADRELVHMIN | |
| | WAKRVPGFVDLTLHDQAHLLERAWLEILMIGLVWRSME | |
| | HPGKLLFAPNLLLDRNQGKCVEGMVEIFDMLLATSSRFR | |
| | MMNLQGEEFVCLKSIILLNSGVYTFLSSTLKSLEEKDHIH | |
| | RALDKITDTLIHLMAKAGLTLQQQHQRLAQLLLILSHIRH | |
| | MSNKGMEHLYSMKYKNVVPLYDLLLEMLDAHRLHAGG | |
| | SGASRVQAFADALDDKFLHDMLAEGLRYSVIREVLPTRR | |
| | ARTFDLEVEELHTLVAEGVVVHNC | |
| 37R3-3 | CLAEGTRIFDPVTGTTHRIEDVVDGRKPIHVVAVAKDGTL | SEQ ID NO: 23 |
| INTEIN | LARPVVSWFDQGTRDVIGLRIAGGATVWATPDHKVLTEY | |
| | GWRAAGELRKGDRVAGPGGSGNSLALSLTADQMVSALL | |
| | DAEPPILYSEYDPTSPFSEASMMGLLTNLADRELVHMIN | |
| | WAKRVPGFVDLTLHDQAHLLERAWLEILMIGLVWRSME | |
| | HPGKLLFAPNLLLDRNQGKCVEGMVEIFDMLLATSSRFR | |
| | MMNLQGEEFVCLKSIILLNSGVYTFLSSTLKSLEEKDHIH | |
| | RALDKITDTLIHLMAKAGLTLQQQHQRLAQLLLILSHIRH | |
| | MSNKGMEHLYSMKYKNVVPLYDLLLEMLDAHRLHAGG | |
| | SGASRVQAFADALDDKFLHDMLAEELRYSVIREVLPTRR | |
| | ARTFDLEVEELHTLVAEGVVVHNC | |

[0276] The term “linker,” as used herein, refers to a molecule linking two other molecules or moieties. The linker can be an amino acid sequence in the case of a linker joining two fusion proteins. For example, a Cas9 can be fused to a polymerase (e.g., reverse transcriptase) by an amino acid linker sequence. The linker can also be a nucleotide sequence in the case of joining two nucleotide sequences together. For example, in the instant case, the traditional guide RNA is linked via a spacer or linker nucleotide sequence to the RNA extension of a prime editing guide RNA which may comprise a RT template sequence and an RT primer binding site. In other embodiments, the linker is an organic molecule, group, polymer, or chemical moiety. In some embodiments, the linker is 5-100 amino acids in length, for example, 5, 6, 7, 8, 9, 10, 11, 12, 13, 14, 15, 16, 17, 18, 19, 20, 21, 22, 23, 24, 25, 26, 27, 28, 29, 30, 30-35, 35-40, 40-45, 45-50, 50-60, 60-70, 70-80, 80-90, 90-100, 100-150, or 150-200 amino acids in length. Longer or shorter linkers are also contemplated.

### Isolated

[0277] “Isolated” means altered or removed from the natural state. For example, a nucleic 20 acid or a peptide naturally present in a living animal is not “isolated,” but the same nucleic acid or peptide partially or completely separated from the coexisting materials of its natural state is “isolated.” An isolated nucleic acid or protein can exist in substantially purified form, or can exist in a non-native environment such as, for example, a host cell.

[0278] In some embodiments, a gene of interest is encoded by an isolated nucleic acid. As used herein, the term “isolated,” refers to the characteristic of a material as provided herein being removed from its original or native environment (e.g., the natural environment if it is naturally occurring). Therefore, a naturally-occurring polynucleotide or protein or polypeptide present in a living animal is not isolated, but the same polynucleotide or polypeptide, separated by human intervention from some or all of the coexisting materials in the natural system, is isolated. An artificial or engineered material, for example, a non-naturally occurring nucleic acid construct, such as the expression constructs and vectors described herein, are, accordingly, also referred to as isolated. A material does not have to be purified in order to be isolated. Accordingly, a material may be part of a vector and/or part of a composition, and still be isolated in that such vector or composition is not part of the environment in which the material is found in nature.

### MS2 Tagging Technique

[0279] In various embodiments (e.g., as depicted in the embodiments of FIGS. 72-73 and in Example 19), the term “MS2 tagging technique” refers to the combination of an “RNA-protein interaction domain” (aka “RNA-protein recruitment domain or protein”) paired up with an RNA-binding protein that specifically recognizes and binds to the RNA-protein interaction domain, e.g., a specific hairpin structure. These types of systems can be leveraged to recruit a variety of functionalities to a prime editor complex that is bound to a target site. The MS2 tagging technique is based on the natural interaction of the MS2 bacteriophage coat protein (“MCP” or “MS2cp”) with a stem-loop or hairpin structure present in the genome of the phage, i.e., the “MS2 hairpin.” In the case of prime editing, the MS2 tagging technique comprises introducing the MS2 hairpin into a desired RNA molecule involved in prime editing (e.g., a pegRNA or a tPERT), which then constitutes a specific interactable binding target for an RNA-binding protein that recognizes and binds to that structure. In the case of the MS2 hairpin, it is recognized and bound by the MS2 bacteriophage coat protein (MCP). And, if MCP is fused to another protein (e.g., a reverse transcriptase or other DNA polymerase), then the MS2 hairpin may be used to “recruit” that other protein in trans to the target site occupied by the prime editing complex.

[0280] The prime editors described herein may incorporate as an aspect any known RNA-protein interaction domain to recruit or “co-localize” specific functions of interest to a prime editor complex. A review of other modular RNA-protein interaction domains are described in the art, for example, in Johansson et al., “RNA recognition by the MS2 phage coat protein,” Sem Virol., 1997, Vol. 8(3): 176-185; Delebecque et al., “Organization of intracellular reactions with rationally designed RNA assemblies,” Science, 2011, Vol. 333: 470-474; Mali et al., “Cas9 transcriptional activators for target specificity screening and paired nickases for cooperative genome engineering,” Nat. Biotechnol., 2013, Vol. 31: 833-838; and Zalatan et al., “Engineering complex synthetic transcriptional programs with CRISPR RNA scaffolds,” Cell, 2015, Vol. 160: 339-350, each of which are incorporated herein by reference in their entireties. Other systems include the PP7 hairpin, which specifically recruits the PCP protein, and the “com” hairpin, which specifically recruits the Com protein. See Zalatan et al.

[0281] The nucleotide sequence of the MS2 hairpin (or equivalently referred to as the “MS2 aptamer”) is: GCCAACATGAGGATCACCCATGTCTGCAGGGCC (SEQ ID NO: 24).

[0282] The amino acid sequence of the MCP or MS2cp is: GSASNFTQFVLVDNGGTGDVTVAPSNFANGVAEWISSNSRSQAYKVTCSVRQSSAQ NRKYTIKVEVPKVATQTVGGEELPVAGWRSYLNMELTIPIFATNSDCELIVKAMQGL LKDGNPIPSAIAANSGIY (SEQ ID NO: 25).

[0283] The MS2 hairpin (or “MS2 aptamer”) may also be referred to as a type of “RNA effector recruitment domain” (or equivalently as “RNA-binding protein recruitment domain” or simply as “recruitment domain”) since it is a physical structure (e.g., a hairpin) that is installed into a pegRNA or tPERT that effectively recruits other effector functions (e.g., RNA-binding proteins having various functions, such as DNA polymerases or other DNA-modifying enzymes) to the pegRNA or rPERT that is so modified, and thus, co-localizing effector functions in trans to the prime editing machinery. This application is not intended to be limited in any way to any particular RNA effector recruitment domains and may include any available such domain, including the MS2 hairpin. Example 19 and FIG. 72(b) depicts the use of the MS2 aptamer joined to a DNA synthesis domain (i.e., the tPERT molecule) and a prime editor that comprises an MS2cp protein fused to a PE2 to cause the co-localization of the prime editor complex (MS2cp-PE2:sgRNA complex) bound to the target DNA site and the DNA synthesis domain of the tPERT molecule to effectuate the

napDNAbp

[0284] As used herein, the term “nucleic acid programmable DNA binding protein” or “napDNAbp,” of which Cas9 is an example, refers to a protein that uses RNA:DNA hybridization to target and bind to specific sequences in a DNA molecule. Each napDNAbp is associated with at least one guide nucleic acid (e.g., guide RNA), which localizes the napDNAbp to a DNA sequence that comprises a DNA strand (i.e., a target strand) that is complementary to the guide nucleic acid, or a portion thereof (e.g., the protospacer of a guide RNA). In other words, the guide nucleic-acid “programs” the napDNAbp (e.g., Cas9 or equivalent) to localize and bind to a complementary sequence.

[0285] Without being bound by theory, the binding mechanism of a napDNAbp—guide RNA complex, in general, includes the step of forming an R-loop whereby the napDNAbp induces the unwinding of a double-strand DNA target, thereby separating the strands in the region bound by the napDNAbp. The guide RNA protospacer then hybridizes to the “target strand.” This displaces a “non-target strand” that is complementary to the target strand, which forms the single strand region of the R-loop. In some embodiments, the napDNAbp includes one or more nuclease activities, which then cut the DNA leaving various types of lesions. For example, the napDNAbp may comprises a nuclease activity that cuts the non-target strand at a first location, and/or cuts the target strand at a second location. Depending on the nuclease activity, the target DNA can be cut to form a “double-stranded break” whereby both strands are cut. In other embodiments, the target DNA can be cut at only a single site, i.e., the DNA is “nicked” on one strand. Exemplary napDNAbp with different nuclease activities include “Cas9 nickase” (“nCas9”) and a deactivated Cas9 having no nuclease activities (“dead Cas9” or “dCas9”). Exemplary sequences for these and other napDNAbp are provided herein.

### Nickase

[0286] As used herein, a “nickase” refers to a napDNAbp (e.g., a Cas protein) which is capable of cleaving only one of the two complementary strands of a double-stranded target DNA sequence, thereby generating a nick in that strand. In some embodiments, the nickase cleaves a non-target strand of a double stranded target DNA sequence. In some embodiments, the nickase comprises an amino acid sequence with one or more mutations in a catalytic domain of a canonical napDNAbp (e.g., a Cas protein), wherein the one or more mutations reduces or abolishes nuclease activity of the catalytic domain. In some embodiments, the nickase is a Cas9 that comprises one or more mutations in a RuvC-like domain relative to a wild type Cas9 sequence or to an equivalent amino acid position in other Cas9 variants or Cas9 equivalents. In some embodiments, the nickase is a Cas9 that comprises one or more mutations in a HNH-like domain relative to a wild type Cas9 sequence or to an equivalent amino acid position in other Cas9 variants or Cas9 equivalents. In some embodiments, the nickase is a Cas9 that comprises an aspartate-to-alanine substitution (D10A) in the RuvC I catalytic domain of Cas9 relative to a canonical Cas9 sequence or to an equivalent amino acid position in other Cas9 variants or Cas9 equivalents. In some embodiments, the nickase is a Cas9 that comprises a H840A, N854A, and/or N863A mutation relative to a canonical Cas9 sequence, or to an equivalent amino acid position in other Cas9 variants or Cas9 equivalents. In some embodiments, the term “Cas9 nickase” refers to a Cas9 with one of the two nuclease domains inactivated. This enzyme is capable of cleaving only one strand of a target DNA. In some embodiments, the nickase is a Cas protein that is not a Cas9 nickase. Nuclear localization sequence (NLS)

[0287] The term “nuclear localization sequence” or “NLS” refers to an amino acid sequence that promotes import of a protein into the cell nucleus, for example, by nuclear transport. Nuclear localization sequences are known in the art and would be apparent to the skilled artisan. For example, NLS sequences are described in Plank et al., international PCT application, PCT/EP2000/011690, filed Nov. 23, 2000, published as WO/2001/038547 on May 31, 2001, the contents of which are incorporated herein by reference for its disclosure of exemplary nuclear localization sequences. In some embodiments, a NLS comprises the amino acid sequence PKKKRKV (SEQ ID NO: 26) or MDSLLMNRRKFLYQFKNVRWAKGRRETYLC (SEQ ID NO: 27).

### Nucleic Acid Molecule

[0288] The term “nucleic acid,” as used herein, refers to a polymer of nucleotides. The polymer may include natural nucleosides (i.e., adenosine, thymidine, guanosine, cytidine, uridine, deoxyadenosine, deoxythymidine, deoxyguanosine, and deoxycytidine), nucleoside analogs (e.g., 2-aminoadenosine, 2-thiothymidine, inosine, pyrrolo-pyrimidine, 3-methyl adenosine, 5-methylcytidine, C5 bromouridine, C5 fluorouridine, C5 iodouridine, C5 propynyl uridine, C5 propynyl cytidine, C5 methylcytidine, 7 deazaadenosine, 7 deazaguanosine, 8 oxoadenosine, 8 oxoguanosine, 0(6) methylguanine, 4-acetylcytidine, 5-(carboxyhydroxymethyl)uridine, dihydrouridine, methylpseudouridine, 1-methyl adenosine, 1-methyl guanosine, N6-methyl adenosine, and 2-thiocytidine), chemically modified bases, biologically modified bases (e.g., methylated bases), intercalated bases, modified sugars (e.g., 2′-fluororibose, ribose, 2′-deoxyribose, 2′-O-methylcytidine, arabinose, and hexose), or modified phosphate groups (e.g., phosphorothioates and 5′ N phosphoramidite linkages).

### Nucleotide Structural Motifs (or Nucleic Acid Moiety)

[0289] As used herein, the term “nucleotide structural motif” or equivalently, “nucleic acid moiety,” refers to nucleic acid molecule or a portion thereof, which forms a secondary or tertiary structure due to basepairing interactions within a single nucleic acid polymer or between two or more nucleic acid polymers. Such nucleotide structural motifs can be formed from DNA, RNA, or a hybrid of DNA and RNA. The term is not meant to refer to standard DNA double-helices. Examples of nucleic acid moieties include, but are not limited to, a toe-loop, hairpin, stem-loop, pseudoknot, aptamer, G quadraplex, tRNA, ribozyme, riboswitch, A-form DNA, B-form DNA, or Z-form DNA.

pegRNA

[0290] As used herein, the terms “prime editing guide RNA” or “pegRNA” or “extended guide RNA” refer to a specialized form of a guide RNA that has been modified to include one or more additional sequences for implementing the prime editing methods and compositions described herein. As described herein, the prime editing guide RNA comprise one or more “extended regions” of nucleic acid sequence. The extended regions may comprise, but are not limited to, single-stranded RNA or DNA. Further, the extended regions may occur at the 3′ end of a traditional guide RNA. In other arrangements, the extended regions may occur at the 5′ end of a traditional guide RNA. In still other arrangements, the extended region may occur at an intramolecular region of the traditional guide RNA, for example, in the gRNA core region which associates and/or binds to the napDNAbp. The extended region comprises a “DNA synthesis template” which encodes (by the polymerase of the prime editor) a single-stranded DNA which, in turn, has been designed to be (a) homologous with the endogenous target DNA to be edited, and (b) which comprises at least one desired nucleotide change (e.g., a transition, a transversion, a deletion, or an insertion) to be introduced or integrated into the endogenous target DNA. The extended region may also comprise other functional sequence elements, such as, but not limited to, a “primer binding site” and a “spacer or linker” sequence, or other structural elements, such as, but not limited to aptamers, stem loops, hairpins, toe loops (e.g., a 3′ toeloop), or an RNA-protein recruitment domain (e.g., MS2 hairpin). As used herein the “primer binding site” comprises a sequence that hybridizes to a single-strand DNA sequence having a 3′ end generated from the nicked DNA of the R-loop.

[0291] In certain embodiments, the pegRNAs are represented by FIG. 3A, which shows a pegRNA having a 5′ extension arm, a spacer, and a gRNA core. The 5′ extension further comprises in the 5′ to 3′ direction a reverse transcriptase template, a primer binding site, and a linker. As shown, the reverse transcriptase template may also be referred to more broadly as the “DNA synthesis template” where the polymerase of a prime editor described herein is not an RT, but another type of polymerase.

[0292] In certain other embodiments, the pegRNAs are represented by FIG. 3B, which shows a pegRNA having a 5′ extension arm, a spacer, and a gRNA core. The 5′ extension further comprises in the 5′ to 3′ direction a reverse transcriptase template, a primer binding site, and a linker. As shown, the reverse transcriptase template may also be referred to more broadly as the “DNA synthesis template” where the polymerase of a prime editor described herein is not an RT, but another type of polymerase.

[0293] In still other embodiments, the pegRNAs are represented by FIG. 3D, which shows a pegRNA having in the 5′ to 3′ direction a spacer (1), a gRNA core (2), and an extension arm (3). The extension arm (3) is at the 3′ end of the pegRNA. The extension arm (3) further comprises in the 5′ to 3′ direction a “primer binding site” (A), an “edit template” (B), and a “homology arm” (C). The extension arm (3) may also comprise an optional modifier region at the 3′ and 5′ ends, which may be the same sequences or different sequences. In addition, the 3′ end of the pegRNA may comprise a transcriptional terminator sequence. These sequence elements of the pegRNAs are further described and defined herein.

[0294] In still other embodiments, the pegRNAs are represented by FIG. 3E, which shows a pegRNA having in the 5′ to 3′ direction an extension arm (3), a spacer (1), and a gRNA core (2). The extension arm (3) is at the 5′ end of the pegRNA. The extension arm (3) further comprises in the 3′ to 5′ direction a “primer binding site” (A), an “edit template” (B), and a “homology arm” (C). The extension arm (3) may also comprise an optional modifier region at the 3′ and 5′ ends, which may be the same sequences or different sequences. The pegRNAs may also comprise a transcriptional terminator sequence at the 3′ end. These sequence elements of the pegRNAs are further described and defined herein.

### PE1

[0295] As used herein, “PE1” refers to a PE complex comprising a fusion protein comprising Cas9(H840A) and a wild type MMLV RT having the following structure: [NLS]-[Cas9(H840A)]-[linker]-[MMLV_RT(wt)]+a desired pegRNA, wherein the PE fusion has the amino acid sequence of SEQ ID NO: 28.

### PE2

[0296] As used herein, “PE2” refers to a PE complex comprising a fusion protein comprising Cas9(H840A) and a variant MMLV RT having the following structure: [NLS]-[Cas9(H840A)]-[linker]-[MMLV_RT(D200N)(T330P)(L603W)(T306K)(W313F)]+a desired pegRNA, wherein the PE fusion has the amino acid sequence of SEQ ID NO: 33.

### PE3

[0297] As used herein, “PE3” refers to PE2 plus a second-strand nicking guide RNA that complexes with the PE2 and introduces a nick in the non-edited DNA strand in order to induce preferential replacement of the edited strand.

### PE3b

[0298] As used herein, “PE3b” refers to PE3 but wherein the second-strand nicking guide RNA is designed for temporal control such that the second strand nick is not introduced until after the installation of the desired edit. This is achieved by designing a gRNA with a spacer sequence that matches only the edited strand, but not the original allele. Using this strategy, referred to hereafter as PE3b, mismatches between the protospacer and the unedited allele should disfavor nicking by the sgRNA until after the editing event on the PAM strand takes place.

### PE4

[0299] As used herein, “PE4” refers to a system comprising PE2 plus an MLH1 dominant negative protein (i.e., wild-type MLH1 with amino acids 754-756 truncated, which may be referred to herein as “MLH1 Δ754-756” or “MLH1dn”) expressed in trans. In some embodiments, PE4 refers to a fusion protein comprising PE2 and an MLH1 dominant negative protein joined via an optional linker.

### PE5

[0300] As used herein, “PE5” refers to a system comprising PE3 plus an MLH1 dominant negative protein (i.e., wild-type MLH1 with amino acids 754-756 truncated as described further herein, which may be referred to as “MLH1 Δ754-756” or “MLH1dn”) expressed in trans. In some embodiments, PE5 refers to a fusion protein comprising PE3 and an MLH1 dominant negative protein joined via an optional linker.

### PE-Short

[0301] As used herein, “PE-short” refers to a PE construct that is fused to a C-terminally truncated reverse transcriptase, and has the following amino acid sequence:

(SEQ ID NO: 35)
MKRTADGSEFESPKKKRKVDKKYSIGLDIGTNSVGWAVITDEYKVPSKKFK
VLGNTDRHSIKKNLIGALLFDSGETAEATRLKRTARRRYTRRKNRICYLQE
IFSNEMAKVDDSFFHRLEESFLVEEDKKHERHPIFGNIVDEVAYHEKYPTI
YHLRKKLVDSTDKADLRLIYLALAHMIKFRGHFLIEGDLNPDNSDVDKLFI
QLVQTYNQLFEENPINASGVDAKAILSARLSKSRRLENLIAQLPGEKKNGL
FGNLIALSLGLTPNFKSNFDLAEDAKLQLSKDTYDDDLDNLLAQIGDQYAD
LFLAAKNLSDAILLSDILRVNTEITKAPLSASMIKRYDEHHQDLTLLKALV
RQQLPEKYKEIFFDQSKNGYAGYIDGGASQEEFYKFIKPILEKMDGTEELL
VKLNREDLLRKQRTFDNGSIPHQIHLGELHAILRRQEDFYPFLKDNREKIE
KILTFRIPYYVGPLARGNSRFAWMTRKSEETITPWNFEEVVDKGASAQSFI
ERMTNFDKNLPNEKVLPKHSLLYEYFTVYNELTKVKYVTEGMRKPAFLSGE
QKKAIVDLLFKTNRKVTVKQLKEDYFKKIECFDSVEISGVEDRFNASLGTY
HDLLKIIKDKDFLDNEENEDILEDIVLTLTLFEDREMIEERLKTYAHLFDD
KVMKQLKRRRYTGWGRLSRKLINGIRDKQSGKTILDFLKSDGFANRNFMQL
IHDDSLTFKEDIQKAQVSGQGDSLHEHIANLAGSPAIKKGILQTVKVVDEL
VKVMGRHKPENIVIEMARENQTTQKGQKNSRERMKRIEEGIKELGSQILKE
HPVENTQLQNEKLYLYYLQNGRDMYVDQELDINRLSDYDVDAIVPQSFLKD
DSIDNKVLTRSDKNRGKSDNVPSEEVVKKMKNYWRQLLNAKLITQRKFDNL
TKAERGGLSELDKAGFIKRQLVETRQITKHVAQILDSRMNTKYDENDKLIR
EVKVITLKSKLVSDFRKDFQFYKVREINNYHHAHDAYLNAVVGTALIKKYP
KLESEFVYGDYKVYDVRKMIAKSEQEIGKATAKYFFYSNIMNFFKTEITLA
NGEIRKRPLIETNGETGEIVWDKGRDFATVRKVLSMPQVNIVKKTEVQTGG
FSKESILPKRNSDKLIARKKDWDPKKYGGFDSPTVAYSVLVVAKVEKGKSK
KLKSVKELLGITIMERSSFEKNPIDFLEAKGYKEVKKDLIIKLPKYSLFEL
ENGRKRMLASAGELQKGNELALPSKYVNFLYLASHYEKLKGSPEDNEQKQL
FVEQHKHYLDEIIEQISEFSKRVILADANLDKVLSAYNKHRDKPIREQAEN
IIHLFTLTNLGAPAAFKYFDTTIDRKRYTSTKEVLDATLIHQSITGLYETR
IDLSQLGGDSGGSSGGSSGSETPGTSESATPESSGGSSGGSSTLNIEDEYR
LHETSKEPDVSLGSTWLSDFPQAWAETGGMGLAVRQAPLIIPLKATSTPVS
IKQYPMSQEARLGIKPHIQRLLDQGILVPCQSPWNTPLLPVKKPGTNDYRP
VQDLREVNKRVEDIHPTVPNPYNLLSGLPPSHQWYTVLDLKDAFFCLRLHP
TSQPLFAFEWRDPEMGISGQLTWTRLPQGFKNSPTLFNEALHRDLADFRIQ
HPDLILLQYVDDLLLAATSELDCQQGTRALLQTLGNLGYRASAKKAQICQK
QVKYLGYLLKEGQRWLTEARKETVMGQPTPKTPRQLREFLGKAGFCRLFIP
GFAEMAAPLYPLTKPGTLFNWGPDQQKAYQEIKQALLTAPALGLPDLTKPF
ELFVDEKQGYAKGVLTQKLGPWRRPVAYLSKKLDPVAAGWPPCLRMVAAIA
VLTKDAGKLTMGQPLVILAPHAVEALVKQPPDRWLSNARMTHYQALLLDTD
RVQFGPVVALNPATLLPLPEEGLQHNCLDNSRLINSGGSKRTADGSEFEPK
KKRKV
KEY:
NUCLEAR LOCALIZATION SEQUENCE (NLS)
TOP: (SEQ ID NO: 29), BOTTOM: (SEQ ID NO: 30)
CAS9(H840A) (SEQ ID NO: 31)
33-AMINO ACID LINKER 1 (SEQ ID NO: 11)
M-MLV TRUNCATED REVERSE TRANSCRIPTASE
(SEQ ID NO: 36)

### Peptide Tag

[0302] The term “peptide tag” refers to a peptide amino acid sequence that is genetically fused to a protein sequence to impart one or more functions onto the proteins that facilitate the manipulation of the protein for various purposes, such as, visualization, purification, solubilization, and separation, etc. Peptide tags can include various types of tags categorized by purpose or function, which may include “affinity tags” (to facilitate protein purification), “solubilization tags” (to assist in proper folding of proteins), “chromatography tags” (to alter chromatographic properties of proteins), “epitope tags” (to bind to high affinity antibodies), “fluorescence tags” (to facilitate visualization of proteins in a cell or in vitro).

### Polymerase

[0303] As used herein, the term “polymerase” refers to an enzyme that synthesizes a nucleotide strand and which may be used in connection with the prime editor systems described herein. The polymerase can be a “template-dependent” polymerase (i.e., a polymerase which synthesizes a nucleotide strand based on the order of nucleotide bases of a template strand). The polymerase can also be a “template-independent” polymerase (i.e., a polymerase which synthesizes a nucleotide strand without the requirement of a template strand). A polymerase may also be further categorized as a “DNA polymerase” or an “RNA polymerase.” In various embodiments, the prime editor system comprises a DNA polymerase. In various embodiments, the DNA polymerase can be a “DNA-dependent DNA polymerase” (i.e., whereby the template molecule is a strand of DNA). In such cases, the DNA template molecule can be a pegRNA, wherein the extension arm comprises a strand of DNA. In such cases, the pegRNA may be referred to as a chimeric or hybrid pegRNA which comprises an RNA portion (i.e., the guide RNA components, including the spacer and the gRNA core) and a DNA portion (i.e., the extension arm). In various other embodiments, the DNA polymerase can be an “RNA-dependent DNA polymerase” (i.e., whereby the template molecule is a strand of RNA). In such cases, the pegRNA is RNA, i.e., including an RNA extension. The term “polymerase” may also refer to an enzyme that catalyzes the polymerization of nucleotide (i.e., the polymerase activity). Generally, the enzyme will initiate synthesis at the 3′-end of a primer annealed to a polynucleotide template sequence (e.g., such as a primer sequence annealed to the primer binding site of a pegRNA), and will proceed toward the 5′ end of the template strand. A “DNA polymerase” catalyzes the polymerization of deoxynucleotides. As used herein in reference to a DNA polymerase, the term DNA polymerase includes a “functional fragment thereof”. A “functional fragment thereof” refers to any portion of a wild-type or mutant DNA polymerase that encompasses less than the entire amino acid sequence of the polymerase and which retains the ability, under at least one set of conditions, to catalyze the polymerization of a polynucleotide. Such a functional fragment may exist as a separate entity, or it may be a constituent of a larger polypeptide, such as a fusion protein.

### Prime Editing

[0304] As used herein, the term “prime editing” refers to a novel approach for gene editing using napDNAbps, a polymerase (e.g., a reverse transcriptase), and specialized guide RNAs that include a DNA synthesis template for encoding desired new genetic information (or deleting genetic information) that is then incorporated into a target DNA sequence. Certain embodiments of prime editing are described in the embodiments of FIGS. 1A-1H and FIG. 72(a)-72(c), among other figures.

[0305] Prime editing represents an entirely new platform for genome editing that is a versatile and precise genome editing method that directly writes new genetic information into a specified DNA site using a nucleic acid programmable DNA binding protein (“napDNAbp”) working in association with a polymerase (i.e., in the form of a fusion protein or otherwise provided in trans with the napDNAbp), wherein the prime editing system is programmed with a prime editing (PE) guide RNA (“pegRNA”) that both specifies the target site and templates the synthesis of the desired edit in the form of a replacement DNA strand by way of an extension (either DNA or RNA) engineered onto a guide RNA (e.g., at the 5′ or 3′ end, or at an internal portion of a guide RNA). The replacement strand containing the desired edit (e.g., a single nucleobase substitution) shares the same (or is homologous to) sequence as the endogenous strand (immediately downstream of the nick site) of the target site to be edited (with the exception that it includes the desired edit). Through DNA repair and/or replication machinery, the endogenous strand downstream of the nick site is replaced by the newly synthesized replacement strand containing the desired edit. In some cases, prime editing may be thought of as a “search-and-replace” genome editing technology since the prime editors, as described herein, not only search and locate the desired target site to be edited, but at the same time, encode a replacement strand containing a desired edit which is installed in place of the corresponding target site endogenous DNA strand. The prime editors of the present disclosure relate, in part, to the discovery that the mechanism of target-primed reverse transcription (TPRT) or “prime editing” can be leveraged or adapted for conducting precision CRISPR/Cas-based genome editing with high efficiency and genetic flexibility (e.g., as depicted in various embodiments of FIGS. 1A-1F). TPRT is naturally used by mobile DNA elements, such as mammalian non-LTR retrotransposons and bacterial Group II introns^{28,29}. The inventors have herein used Cas protein-reverse transcriptase fusions or related systems to target a specific DNA sequence with a guide RNA, generate a single strand nick at the target site, and use the nicked DNA as a primer for reverse transcription of an engineered reverse transcriptase template that is integrated with the guide RNA. However, while the concept begins with prime editors that use reverse transcriptase as the DNA polymerase component, the prime editors described herein are not limited to reverse transcriptases but may include the use of virtually any DNA polymerase. Indeed, while the application throughout may refer to prime editors with “reverse transcriptases,” it is set forth here that reverse transcriptases are only one type of DNA polymerase that may work with prime editing. Thus, where ever the specification mentions a “reverse transcriptase,” the person having ordinary skill in the art should appreciate that any suitable DNA polymerase may be used in place of the reverse transcriptase. Thus, in one aspect, the prime editors may comprise Cas9 (or an equivalent napDNAbp) which is programmed to target a DNA sequence by associating it with a specialized guide RNA (i.e., pegRNA) containing a spacer sequence that anneals to a complementary protospacer in the target DNA. The specialized guide RNA also contains new genetic information in the form of an extension that encodes a replacement strand of DNA containing a desired genetic alteration which is used to replace a corresponding endogenous DNA strand at the target site. To transfer information from the pegRNA to the target DNA, the mechanism of prime editing involves nicking the target site in one strand of the DNA to expose a 3′-hydroxyl group. The exposed 3′-hydroxyl group can then be used to prime the DNA polymerization of the edit-encoding extension on pegRNA directly into the target site. In various embodiments, the extension—which provides the template for polymerization of the replacement strand containing the edit—can be formed from RNA or DNA. In the case of an RNA extension, the polymerase of the prime editor can be an RNA-dependent DNA polymerase (such as, a reverse transcriptase). In the case of a DNA extension, the polymerase of the prime editor may be a DNA-dependent DNA polymerase. The newly synthesized strand (i.e., the replacement DNA strand containing the desired edit) that is formed by the herein disclosed prime editors would be homologous to the genomic target sequence (i.e., have the same sequence as) except for the inclusion of a desired nucleotide change (e.g., a single nucleotide change, a deletion, or an insertion, or a combination thereof). The newly synthesized (or replacement) strand of DNA may also be referred to as a single strand DNA flap, which would compete for hybridization with the complementary homologous endogenous DNA strand, thereby displacing the corresponding endogenous strand. In certain embodiments, the system can be combined with the use of an error-prone reverse transcriptase enzyme (e.g., provided as a fusion protein with the Cas9 domain, or provided in trans to the Cas9 domain). The error-prone reverse transcriptase enzyme can introduce alterations during synthesis of the single strand DNA flap. Thus, in certain embodiments, error-prone reverse transcriptase can be utilized to introduce nucleotide changes to the target DNA. Depending on the error-prone reverse transcriptase that is used with the system, the changes can be random or non-random. Resolution of the hybridized intermediate (comprising the single strand DNA flap synthesized by the reverse transcriptase hybridized to the endogenous DNA strand) can include removal of the resulting displaced flap of endogenous DNA (e.g., with a 5′ end DNA flap endonuclease, FEN1), ligation of the synthesized single strand DNA flap to the target DNA, and assimilation of the desired nucleotide change as a result of cellular DNA repair and/or replication processes. Because templated DNA synthesis offers single nucleotide precision for the modification of any nucleotide, including insertions and deletions, the scope of this approach is very broad and could foreseeably be used for myriad applications in basic science and therapeutics.

[0306] In various embodiments, prime editing operates by contacting a target DNA molecule (for which a change in the nucleotide sequence is desired to be introduced) with a nucleic acid programmable DNA binding protein (napDNAbp) complexed with a prime editing guide RNA (pegRNA). In reference to FIG. 1G, the prime editing guide RNA (pegRNA) comprises an extension at the 3′ or 5′ end of the guide RNA, or at an intramolecular location in the guide RNA and encodes the desired nucleotide change (e.g., single nucleotide change, insertion, or deletion). In step (a), the napDNAbp/pegRNA complex contacts the DNA molecule and the extended pegRNA guides the napDNAbp to bind to a target locus. In step (b), a nick in one of the strands of DNA of the target locus is introduced (e.g., by a nuclease or chemical agent), thereby creating an available 3′ end in one of the strands of the target locus. In certain embodiments, the nick is created in the strand of DNA that corresponds to the R-loop strand, i.e., the strand that is not hybridized to the guide RNA sequence, i.e., the “non-target strand.” The nick, however, could be introduced in either of the strands. That is, the nick could be introduced into the R-loop “target strand” (i.e., the strand hybridized to C pegRNA) or the “non-target strand” (i.e., the strand forming the single-stranded portion of the R-loop and which is complementary to the target strand). In step (c), the 3′ end of the DNA strand (formed by the nick) interacts with the extended portion of the guide RNA in order to prime reverse transcription (i.e., “target-primed RT”). In certain embodiments, the 3′ end DNA strand hybridizes to a specific RT priming sequence on the extended portion of the guide RNA, i.e., the “reverse transcriptase priming sequence” or “primer binding site” on the pegRNA. In step (d), a reverse transcriptase (or other suitable DNA polymerase) is introduced which synthesizes a single strand of DNA from the 3′ end of the primed site towards the 5′ end of the prime editing guide RNA. The DNA polymerase (e.g., reverse transcriptase) can be fused to the napDNAbp or alternatively can be provided in trans to the napDNAbp. This forms a single-strand DNA flap comprising the desired nucleotide change (e.g., the single base change, insertion, or deletion, or a combination thereof) and which is otherwise homologous to the endogenous DNA at or adjacent to the nick site. In step (e), the napDNAbp and guide RNA are released. Steps (f) and (g) relate to the resolution of the single strand DNA flap such that the desired nucleotide change becomes incorporated into the target locus. This process can be driven towards the desired product formation by removing the corresponding 5′ endogenous DNA flap that forms once the 3′ single strand DNA flap invades and hybridizes to the endogenous DNA sequence. Without being bound by theory, the cells endogenous DNA repair and replication processes resolves the mismatched DNA to incorporate the nucleotide change(s) to form the desired altered product. The process can also be driven towards product formation with “second strand nicking,” as exemplified in FIG. 1F. This process may introduce at least one or more of the following genetic changes: transversions, transitions, deletions, and insertions.

[0307] The term “prime editor (PE) system” or “prime editor (PE)” or “PE system” or “PE editing system” refers the compositions involved in the method of genome editing using prime editing described herein, including, but not limited to the napDNAbps, reverse transcriptases, fusion proteins (e.g., comprising napDNAbps and reverse transcriptases), prime editing guide RNAs, and complexes comprising fusion proteins and prime editing guide RNAs, as well as accessory elements, such as second strand nicking components (e.g., second strand sgRNAs) and 5′ endogenous DNA flap removal endonucleases (e.g., FEN1) for helping to drive the prime editing process towards the edited product formation.

[0308] Although in the embodiments described thus far the pegRNA constitutes a single molecule comprising a guide RNA (which itself comprises a spacer sequence and a gRNA core or scaffold) and a 5′ or 3′ extension arm comprising the primer binding site and a DNA synthesis template (e.g., see FIG. 3D, the pegRNA may also take the form of two individual molecules comprised of a guide RNA and a trans prime editor RNA template (tPERT), which essentially houses the extension arm (including, in particular, the primer binding site and the DNA synthesis domain) and an RNA-protein recruitment domain (e.g., MS2 aptamer or hairpin) in the same molecule which becomes co-localized or recruited to a modified prime editor complex that comprises a tPERT recruiting protein (e.g., MS2cp protein, which binds to the MS2 aptamer). See FIG. 3G and FIG. 3H as an example of a tPERT that may be used with prime editing.

### Prime Editor

[0309] The term “prime editor” refers to the herein described fusion constructs comprising a napDNAbp (e.g., Cas9 nickase) and a reverse transcriptase and is capable of carrying out prime editing on a target nucleotide sequence in the presence of a pegRNA (or “extended guide RNA”). The term “prime editor” may refer to the fusion protein or to the fusion protein complexed with a pegRNA, and/or further complexed with a second-strand nicking sgRNA. In some embodiments, the prime editor may also refer to the complex comprising a fusion protein (reverse transcriptase fused to a napDNAbp), a pegRNA, and a regular guide RNA capable of directing the second-site nicking step of the non-edited strand as described herein. In other embodiments, the reverse transcriptase component of the “primer editor” may be provided in trans.

### Primer Binding Site

[0310] The term “primer binding site” or “the PBS” refers to the portion of nucleotide sequence located on a pegRNA as component of the extension arm (typically for example, at the 3′ end of the extension arm). The term “primer binding site” refers to a single-stranded portion of the PEgRNA as a component of the extension arm that comprises a region of complementarity to a sequence on the non-target strand. In some embodiments, the primer binding site is complementary to a region upstream of a nick site in a non-target strand. In some embodiments, the primer binding site is complementary to a region immediately upstream of a nick site in the non-target strand. In some embodiments, the primer binding site is capable of binding to the primer sequence that is formed after nicking of the target sequence by the prime editor. When the prime editor nicks one strand of the target DNA sequence (e.g., by a Cas nickase component of the prime editor), a 3′-ended ssDNA flap is formed, which serves a primer sequence that anneals to the primer binding site on the pegRNA to prime reverse transcription. FIGS. 27 and 28 show embodiments of the primer binding site located on a 3′ and 5′ extension arm, respectively. In some embodiments, the PBS is complementary to or substantially complementary to, and can anneal to a free 3′ end on the non-target strand of the double stranded target DNA at the nick site. In some embodiments, the PBS annealed to the free 3′ end on the non-target strand can initiate target-primed DNA synthesis.

### Promoter

[0311] The term “promoter” is art-recognized and refers to a nucleic acid molecule with a sequence recognized by the cellular transcription machinery and able to initiate transcription of a downstream gene. A promoter can be constitutively active, meaning that the promoter is always active in a given cellular context, or conditionally active, meaning that the promoter is only active in the presence of a specific condition. For example, a conditional promoter may only be active in the presence of a specific protein that connects a protein associated with a regulatory element in the promoter to the basic transcriptional machinery, or only in the absence of an inhibitory molecule. A subclass of conditionally active promoters are inducible promoters that require the presence of a small molecule “inducer” for activity. Examples of inducible promoters include, but are not limited to, arabinose-inducible promoters, Tet-on promoters, and tamoxifen-inducible promoters. A variety of constitutive, conditional, and inducible promoters are well known to the skilled artisan, and the skilled artisan will be able to ascertain a variety of such promoters useful in carrying out the instant invention, which is not limited in this respect.

### Protospacer

[0312] As used herein, the term “protospacer” refers to the sequence (˜20 bp) in DNA adjacent to the PAM (protospacer adjacent motif) sequence. The protospacer shares the same sequence as the spacer sequence of the guide RNA. The guide RNA anneals to the complement of the protospacer sequence on the target DNA (specifically, one strand thereof, i.e., the “target strand” versus the “non-target strand” of the target DNA sequence). In some embodiments, in order for a Cas nickase component of the prime editor to function, it also requires a specific protospacer adjacent motif (PAM), which varies depending on the Cas protein component itself, e.g., the type of Cas protein and the bacterial species from which it is derived. For example, the most commonly used Cas9 nuclease, derived from S. pyogenes, recognizes a PAM sequence of NGG that is directly downstream of the target sequence in the genomic DNA, on the non-target strand. The skilled person will appreciate that the literature in the state of the art sometimes refers to the “protospacer” as the ˜20-nt target-specific guide sequence on the guide RNA itself, rather than referring to it as a “spacer.” Thus, in some cases, the term “protospacer” as used herein may be used interchangeably with the term “spacer.” The context of the description surrounding the appearance of either “protospacer” or “spacer” will help inform the reader as to whether the term is in reference to the gRNA or the DNA target.

### Protospacer Adjacent Motif (PAM)

[0313] As used herein, the term “protospacer adjacent sequence” or “PAM” refers to an approximately 2-6 base pair DNA sequence that is an important targeting component of a Cas9 nuclease. Typically, the PAM sequence is on either strand, and is downstream in the 5′ to 3′ direction of the Cas9 cut site. The canonical PAM sequence (i.e., the PAM sequence that is associated with the Cas9 nuclease of Streptococcus pyogenes or SpCas9) is 5′-NGG-3′ wherein “N” is any nucleobase followed by two guanine (“G”) nucleobases. Different PAM sequences can be associated with different Cas9 nucleases or equivalent proteins from different organisms. In addition, any given Cas9 nuclease, e.g., SpCas9, may be modified to alter the PAM specificity of the nuclease such that the nuclease recognizes alternative PAM sequence.

[0314] For example, with reference to the canonical SpCas9 amino acid sequence is SEQ ID NO: 37, the PAM sequence can be modified by introducing one or more mutations, including (a) D1135V, R1335Q, and T1337R “the VQR variant”, which alters the PAM specificity to NGAN or NGNG, (b) D1135E, R1335Q, and T1337R “the EQR variant”, which alters the PAM specificity to NGAG, and (c) D1135V, G1218R, R1335E, and T1337R “the VRER variant”, which alters the PAM specificity to NGCG. In addition, the D1135E variant of canonical SpCas9 still recognizes NGG, but it is more selective compared to the wild type SpCas9 protein.

[0315] It will also be appreciated that Cas9 enzymes from different bacterial species (i.e., Cas9 orthologs) can have varying PAM specificities. For example, Cas9 from Staphylococcus aureus (SaCas9) recognizes NGRRT or NGRRN. In addition, Cas9 from Neisseria meningitis (NmCas) recognizes NNNNGATT. In another example, Cas9 from Streptococcus thermophilis (StCas9) recognizes NNAGAAW. In still another example, Cas9 from Treponema denticola (TdCas) recognizes NAAAAC. These are examples and are not meant to be limiting. It will be further appreciated that non-SpCas9s bind a variety of PAM sequences, which makes them useful when no suitable SpCas9 PAM sequence is present at the desired target cut site. Furthermore, non-SpCas9s may have other characteristics that make them more useful than SpCas9. For example, Cas9 from Staphylococcus aureus (SaCas9) is about 1 kilobase smaller than SpCas9, so it can be packaged into adeno-associated virus (AAV). Further reference may be made to Shah et al., “Protospacer recognition motifs: mixed identities and functional diversity,” RNA Biology, 10(5): 891-899 (which is incorporated herein by reference).

### Reverse Transcriptase

[0316] The term “reverse transcriptase” describes a class of polymerases characterized as RNA-dependent DNA polymerases. All known reverse transcriptases require a primer to synthesize a DNA transcript from an RNA template. Historically, reverse transcriptase has been used primarily to transcribe mRNA into cDNA which can then be cloned into a vector for further manipulation. Avian myoblastosis virus (AMV) reverse transcriptase was the first widely used RNA-dependent DNA polymerase (Verma, Biochim. Biophys. Acta 473:1 (1977)). The enzyme has 5′-3′ RNA-directed DNA polymerase activity, 5′-3′ DNA-directed DNA polymerase activity, and RNase H activity. RNase H is a processive 5′ and 3′ ribonuclease specific for the RNA strand for RNA-DNA hybrids (Perbal, A Practical Guide to Molecular Cloning, New York: Wiley & Sons (1984)). Errors in transcription cannot be corrected by reverse transcriptase because known viral reverse transcriptases lack the 3′-5′ exonuclease activity necessary for proofreading (Saunders and Saunders, Microbial Genetics Applied to Biotechnology, London: Croom Helm (1987)). A detailed study of the activity of AMV reverse transcriptase and its associated RNase H activity has been presented by Berger et al., Biochemistry 22:2365-2372 (1983). Another reverse transcriptase which is used extensively in molecular biology is reverse transcriptase originating from Moloney murine leukemia virus (M-MLV). See, e.g., Gerard, G. R., DNA 5:271-279 (1986) and Kotewicz, M. L., et al., Gene 35:249-258 (1985). M-MLV reverse transcriptase substantially lacking in RNase H activity has also been described. See, e.g., U.S. Pat. No. 5,244,797. The invention contemplates the use of any such reverse transcriptases, or variants or mutants thereof.

[0317] In addition, the invention contemplates the use of reverse transcriptases which are error-prone, i.e., which may be referred to as error-prone reverse transcriptases or reverse transcriptases which do not support high fidelity incorporation of nucleotides during polymerization. During synthesis of the single-strand DNA flap based on the RT template integrated with the guide RNA, the error-prone reverse transcriptase can introduce one or more nucleotides which are mismatched with the RT template sequence, thereby introducing changes to the nucleotide sequence through erroneous polymerization of the single-strand DNA flap. These errors introduced during synthesis of the single strand DNA flap then become integrated into the double strand molecule through hybridization to the corresponding endogenous target strand, removal of the endogenous displaced strand, ligation, and then through one more round of endogenous DNA repair and/or sequencing processes.

### Reverse Transcription

[0318] As used herein, the term “reverse transcription” indicates the capability of an enzyme to synthesize a DNA strand (that is, complementary DNA or cDNA) using RNA as a template. In some embodiments, the reverse transcription can be “error-prone reverse transcription,” which refers to the properties of certain reverse transcriptase enzymes which are error-prone in their DNA polymerization activity.

### Protein, Peptide, and Polypeptide

[0319] The terms “protein,” “peptide,” and “polypeptide” are used interchangeably herein, and refer to a polymer of amino acid residues linked together by peptide (amide) bonds. The terms refer to a protein, peptide, or polypeptide of any size, structure, or function. Typically, a protein, peptide, or polypeptide will be at least three amino acids long. A protein, peptide, or polypeptide may refer to an individual protein or a collection of proteins. One or more of the amino acids in a protein, peptide, or polypeptide may be modified, for example, by the addition of a chemical entity such as a carbohydrate group, a hydroxyl group, a phosphate group, a farnesyl group, an isofarnesyl group, a fatty acid group, a linker for conjugation, functionalization, or other modification, etc. A protein, peptide, or polypeptide may also be a single molecule or may be a multi-molecular complex. A protein, peptide, or polypeptide may be just a fragment of a naturally occurring protein or peptide. A protein, peptide, or polypeptide may be naturally occurring, recombinant, or synthetic, or any combination thereof. Any of the proteins provided herein may be produced by any method known in the art. For example, the proteins provided herein may be produced via recombinant protein expression and purification, which is especially suited for fusion proteins comprising a peptide linker. Methods for recombinant protein expression and purification are well known, and include those described by Green and Sambrook, Molecular Cloning: A Laboratory Manual (4th ed., Cold Spring Harbor Laboratory Press, Cold Spring Harbor, N.Y. (2012)), the entire contents of which are incorporated herein by reference.

### Protein Splicing

[0320] The term “protein splicing,” as used herein, refers to a process in which a sequence, an intein (or split inteins, as the case may be), is excised from within an amino acid sequence, and the remaining fragments of the amino acid sequence, the exteins, are ligated via an amide bond to form a continuous amino acid sequence. The term “trans” protein splicing refers to the specific case where the inteins are split inteins and they are located on different proteins.

### Second-Strand Nicking

[0321] The resolution of heteroduplex DNA (i.e., containing one edited and one non-edited strand) formed as a result of prime editing determines long-term editing outcomes. In words, a goal of prime editing is to resolve the heteroduplex DNA (the edited strand paired with the endogenous non-edited strand) formed as an intermediate of PE by permanently integrating the edited strand into the complement, endogenous strand. The approach of “second-strand nicking” can be used herein to help drive the resolution of heteroduplex DNA in favor of permanent integration of the edited strand into the DNA molecule. As used herein, the concept of “second-strand nicking” refers to the introduction of a second nick at a location downstream of the first nick (i.e., the initial nick site that provides the free 3′ end for use in priming of the reverse transcriptase on the extended portion of the guide RNA), preferably on the unedited strand. In certain embodiments, the first nick and the second nick are on opposite strands. In other embodiments, the first nick and the second nick are on opposite strands. In yet another embodiment, the first nick is on the non-target strand (i.e., the strand that forms the single strand portion of the R-loop), and the second nick is on the target strand. In still other embodiments, the first nick is on the edited strand, and the second nick is on the unedited strand. The second nick can be positioned at least 5 nucleotides downstream of the first nick, or at least 6, 7, 8, 9, 10, 11, 12, 13, 14, 15, 16, 17, 18, 19, 20, 21, 22, 23, 24, 25, 26, 27, 28, 29, 30, 40, 50, 60, 70, 80, 90, 100, 110, 120, 130, 140, or 150 or more nucleotides downstream of the first nick. The second nick, in certain embodiments, can be introduced between about 5-150 nucleotides on the unedited strand away from the site of the pegRNA-induced nick, or between about 5-140, or between about 5-130, or between about 5-120, or between about 5-110, or between about 5-100, or between about 5-90, or between about 5-80, or between about 5-70, or between about 5-60, or between about 5-50, or between about 5-40, or between about 5-30, or between about 5-20, or between about 5-10. In one embodiment, the second nick is introduced between 14-116 nucleotides away from the pegRNA-induced nick. Without being bound by theory, the second nick induces the cell's endogenous DNA repair and replication processes towards replacement or editing of the unedited strand, thereby permanently installing the edited sequence on both strands and resolving the heteroduplex that is formed as a result of PE. In some embodiments, the edited strand is the non-target strand and the unedited strand is the target strand. In other embodiments, the edited strand is the target strand, and the unedited strand is the non-target strand.

### Sense Strand

[0322] In genetics, a “sense” strand is the segment within double-stranded DNA that runs from 5′ to 3′, and which is complementary to the antisense strand of DNA, or template strand, which runs from 3′ to 5′. In the case of a DNA segment that encodes a protein, the sense strand is the strand of DNA that has the same sequence as the mRNA, which takes the antisense strand as its template during transcription, and eventually undergoes (typically, not always) translation into a protein. The antisense strand is thus responsible for the RNA that is later translated to protein, while the sense strand possesses a nearly identical makeup to that of the mRNA. Note that for each segment of dsDNA, there will possibly be two sets of sense and antisense, depending on which direction one reads (since sense and antisense is relative to perspective). It is ultimately the gene product, or mRNA, that dictates which strand of one segment of dsDNA is referred to as sense or antisense.

[0323] In the context of a pegRNA, the first step is the synthesis of a single-strand complementary DNA (i.e., the 3′ ssDNA flap, which becomes incorporated) oriented in the 5′ to 3′ direction which is templated off of the pegRNA extension arm. Whether the 3′ ssDNA flap should be regarded as a sense or antisense strand depends on the direction of transcription since it well accepted that both strands of DNA may serve as a template for transcription (but not at the same time). Thus, in some embodiments, the 3′ ssDNA flap (which overall runs in the 5′ to 3′ direction) will serve as the sense strand because it is the coding strand. In other embodiments, the 3′ ssDNA flap (which overall runs in the 5′ to 3′ direction) will serve as the antisense strand and thus, the template for transcription.

### Spacer Sequence

[0324] As used herein, the term “spacer sequence” in connection with a guide RNA or a pegRNA refers to the portion of the guide RNA or pegRNA of about 20 nucleotides (e.g., 16, 17, 18, 19, 20, 21, 22, 23 or 24 nucleotides) which contains a nucleotide sequence that is complementary to the target strand. In some embodiments, the spacer sequence hybridizes to a region on the target strand that is complementary to a protospacer on the non-target strand to form a ssRNA/ssDNA hybrid structure at the target site and a corresponding R loop ssDNA structure of the complementary endogenous DNA strand on the non-target strand.

### Subject

[0325] The term “subject,” as used herein, refers to an individual organism, for example, an individual mammal. In some embodiments, the subject is a human. In some embodiments, the subject is a non-human mammal. In some embodiments, the subject is a non-human primate. In some embodiments, the subject is a rodent. In some embodiments, the subject is a sheep, a goat, a cattle, a cat, or a dog. In some embodiments, the subject is a vertebrate, an amphibian, a reptile, a fish, an insect, a fly, or a nematode. In some embodiments, the subject is a research animal. In some embodiments, the subject is genetically engineered, e.g., a genetically engineered non-human subject. The subject may be of either sex and at any stage of development.

### Split Intein

[0326] Although inteins are most frequently found as a contiguous domain, some exist in a naturally split form. In this case, the two fragments are expressed as separate polypeptides and must associate before splicing takes place, so-called protein trans-splicing.

[0327] An exemplary split intein is the Ssp DnaE intein, which comprises two subunits, namely, DnaE-N and DnaE-C. The two different subunits are encoded by separate genes, namely dnaE-n and dnaE-c, which encode the DnaE-N and DnaE-C subunits, respectively. DnaE is a naturally occurring split intein in Synechocytis sp. PCC6803 and is capable of directing trans-splicing of two separate proteins, each comprising a fusion with either DnaE-N or DnaE-C.

[0328] Additional naturally occurring or engineered split-intein sequences are known in the or can be made from whole-intein sequences described herein or those available in the art. Examples of split-intein sequences can be found in Stevens et al., “A promiscuous split intein with expanded protein engineering applications,” PNAS, 2017, Vol. 114: 8538-8543; Iwai et al., “Highly efficient protein trans-splicing by a naturally split DnaE intein from Nostoc punctiforme, FEBS Lett, 580: 1853-1858, each of which are incorporated herein by reference. Additional split intein sequences can be found, for example, in WO 2013/045632, WO 2014/055782, WO 2016/069774, and EP2877490, the contents each of which are incorporated herein by reference.

[0329] In addition, protein splicing in trans has been described in vivo and in vitro (Shingledecker, et al., Gene 207:187 (1998), Southworth, et al., EMBO J. 17:918 (1998); Mills, et al., Proc. Natl. Acad. Sci. USA, 95:3543-3548 (1998); Lew, et al., J. Biol. Chem., 273:15887-15890 (1998); Wu, et al., Biochim. Biophys. Acta 35732:1 (1998b), Yamazaki, et al., J. Am. Chem. Soc. 120:5591 (1998), Evans, et al., J. Biol. Chem. 275:9091 (2000); Otomo, et al., Biochemistry 38:16040-16044 (1999); Otomo, et al., J. Biolmol. NMR 14:105-114 (1999); Scott, et al., Proc. Natl. Acad. Sci. USA 96:13638-13643 (1999)) and provides the opportunity to express a protein as to two inactive fragments that subsequently undergo ligation to form a functional product, e.g., as shown in FIGS. 66 and 67 with regard to the formation of a complete Prime editor from two separately-expressed halves.

### Target Site

[0330] The term “target site” refers to a sequence within a nucleic acid molecule that is edited by a prime editor (PE) disclosed herein. The target site further refers to the sequence within a nucleic acid molecule to which a complex of the prime editor (PE) and gRNA binds.

tPERT

[0331] See definition for “trans prime editor RNA template (tPERT).”

### Temporal Second-Strand Nicking

[0332] As used herein, the term “temporal second-strand nicking” refers to a variant of second strand nicking whereby the installation of the second nick in the unedited strand occurs only after the desired edit is installed in the edited strand. This avoids concurrent nicks on both strands that could lead to double-stranded DNA breaks. The second-strand nicking guide RNA is designed for temporal control such that the second strand nick is not introduced until after the installation of the desired edit. This is achieved by designing a gRNA with a spacer sequence that matches only the edited strand, but not the original allele. Using this strategy, mismatches between the protospacer and the unedited allele should disfavor nicking by the sgRNA until after the editing event on the PAM strand takes place.

### Trans Prime Editing

[0333] As used herein, the term “trans prime editing” refers to a modified form of prime editing that utilizes a split pegRNA, i.e., wherein the pegRNA is separated into two separate molecules: an sgRNA and a trans prime editing RNA template (tPERT). The sgRNA serves to target the prime editor (or more generally, to target the napDNAbp component of the prime editor) to the desired genomic target site, while the tPERT is used by the polymerase (e.g., a reverse transcriptase) to write new DNA sequence into the target locus once the tPERT is recruited in trans to the prime editor by the interaction of binding domains located on the prime editor and on the tPERT. In one embodiment, the binding domains can include RNA-protein recruitment moieties, such as a MS2 aptamer located on the tPERT and an MS2cp protein fused to the prime editor. An advantage of trans prime editing is that by separating the DNA synthesis template from the guide RNA, one can potentially use longer length templates.

[0334] An embodiment of trans prime editing is shown in FIGS. 3G and 3H. FIG. 3G shows the composition of the trans prime editor complex on the left (“RP-PE:gRNA complex), which comprises an napDNAbp fused to each of a polymerase (e.g., a reverse transcriptase) and a rPERT recruiting protein (e.g., MS2sc), and which is complexed with a guide RNA. FIG. 3G further shows a separate tPERT molecule, which comprises the extension arm features of a pegRNA, including the DNA synthesis template and the primer binding sequence. The tPERT molecule also includes an RNA-protein recruitment domain (which, in this case, is a stem loop structure and can be, for example, MS2 aptamer). As depicted in the process described in FIG. 3H, the RP-PE:gRNA complex binds to and nicks the target DNA sequence. Then, the recruiting protein (RP) recruits a tPERT to co-localize to the prime editor complex bound to the DNA target site, thereby allowing the primer binding site to bind to the primer sequence on the nicked strand, and subsequently, allowing the polymerase (e.g., RT) to synthesize a single strand of DNA against the DNA synthesis template up through the 5′ of the tPERT.

[0335] While the tPERT is shown in FIG. 3G and FIG. 3H as comprising the PBS and DNA synthesis template on the 5′ end of the RNA-protein recruitment domain, the tPERT in other configurations may be designed with the PBS and DNA synthesis template located on the 3′ end of the RNA-protein recruitment domain. However, the tPERT with the 5′ extension has the advantage that synthesis of the single strand of DNA will naturally terminate at the 5′ end of the tPERT and thus, does not risk using any portion of the RNA-protein recruitment domain as a template during the DNA synthesis stage of prime editing.

### Transitions

[0336] As used herein, “transitions” refer to the interchange of purine nucleobases (A↔G) or the interchange of pyrimidine nucleobases (C↔T). This class of interchanges involves nucleobases of similar shape. The compositions and methods disclosed herein are capable of inducing one or more transitions in a target DNA molecule. The compositions and methods disclosed herein are also capable of inducing both transitions and transversion in the same target DNA molecule. These changes involve A↔G, G↔A, C↔T, or T↔C. In the context of a double-strand DNA with Watson-Crick paired nucleobases, transversions refer to the following base pair exchanges: A:T↔G:C, G:G↔A:T, C:G↔T:A, or T:A↔C:G. The compositions and methods disclosed herein are capable of inducing one or more transitions in a target DNA molecule. The compositions and methods disclosed herein are also capable of inducing both transitions and transversion in the same target DNA molecule, as well as other nucleotide changes, including deletions and insertions.

### Transversions

[0337] As used herein, “transversions” refer to the interchange of purine nucleobases for pyrimidine nucleobases, or in the reverse and thus, involve the interchange of nucleobases with dissimilar shape. These changes involve T↔A, T↔G, C↔G, C↔A, A↔T, A↔C, G↔C, and G↔T. In the context of a double-strand DNA with Watson-Crick paired nucleobases, transversions refer to the following base pair exchanges: T:A↔A:T, T:A↔G:C, C:G↔G:C, C:G↔A:T, A:T↔T:A, A:T↔C:G, G:C↔C:G, and G:C↔T:A. The compositions and methods disclosed herein are capable of inducing one or more transversions in a target DNA molecule. The compositions and methods disclosed herein are also capable of inducing both transitions and transversion in the same target DNA molecule, as well as other nucleotide changes, including deletions and insertions.

### Treatment

[0338] The terms “treatment,” “treat,” and “treating,” refer to a clinical intervention aimed to reverse, alleviate, delay the onset of, or inhibit the progress of a disease or disorder, or one or more symptoms thereof, as described herein. As used herein, the terms “treatment,” “treat,” and “treating” refer to a clinical intervention aimed to reverse, alleviate, delay the onset of, or inhibit the progress of a disease or disorder, or one or more symptoms thereof, as described herein. In some embodiments, treatment may be administered after one or more symptoms have developed and/or after a disease has been diagnosed. In other embodiments, treatment may be administered in the absence of symptoms, e.g., to prevent or delay onset of a symptom or inhibit onset or progression of a disease. For example, treatment may be administered to a susceptible individual prior to the onset of symptoms (e.g., in light of a history of symptoms and/or in light of genetic or other susceptibility factors). Treatment may also be continued after symptoms have resolved, for example, to prevent or delay their recurrence.

### Upstream

[0339] As used herein, the terms “upstream” and “downstream” are terms of relativity that define the linear position of at least two elements located in a nucleic acid molecule (whether single or double-stranded) that is orientated in a 5′-to-3′ direction. In particular, a first element is upstream of a second element in a nucleic acid molecule where the first element is positioned somewhere that is 5′ to the second element. For example, a SNP is upstream of a Cas9-induced nick site if the SNP is on the 5′ side of the nick site. Conversely, a first element is downstream of a second element in a nucleic acid molecule where the first element is positioned somewhere that is 3′ to the second element. For example, a SNP is downstream of a Cas9-induced nick site if the SNP is on the 3′ side of the nick site. The nucleic acid molecule can be a DNA (double or single stranded). RNA (double or single stranded), or a hybrid of DNA and RNA. The analysis is the same for single strand nucleic acid molecule and a double strand molecule since the terms upstream and downstream are in reference to only a single strand of a nucleic acid molecule, except that one needs to select which strand of the double stranded molecule is being considered. Often, the strand of a double stranded DNA which can be used to determine the positional relativity of at least two elements is the “sense” or “coding” strand. In genetics, a “sense” strand is the segment within double-stranded DNA that runs from 5′ to 3′, and which is complementary to the antisense strand of DNA, or template strand, which runs from 3′ to 5′. Thus, as an example, a SNP nucleobase is “downstream” of a promoter sequence in a genomic DNA (which is double-stranded) if the SNP nucleobase is on the 3′ side of the promoter on the sense or coding strand.

### Variant

[0340] As used herein the term “variant” should be taken to mean the exhibition of qualities that have a pattern that deviates from what occurs in nature, e.g., a variant Cas9 is a Cas9 comprising one or more changes in amino acid residues as compared to a wild type Cas9 amino acid sequence. The term “variant” encompasses homologous proteins having at least 75%, or at least 80%, or at least 85%, or at least 90%, or at least 95%, or at least 99% percent identity with a reference sequence and having the same or substantially the same functional activity or activities as the reference sequence. The term also encompasses mutants, truncations, or domains of a reference sequence, and which display the same or substantially the same functional activity or activities as the reference sequence.

### Vector

[0341] The term “vector,” as used herein, refers to a nucleic acid that can be modified to encode a gene of interest and that is able to enter into a host cell, mutate and replicate within the host cell, and then transfer a replicated form of the vector into another host cell. Exemplary suitable vectors include viral vectors, such as retroviral vectors or bacteriophages and filamentous phage, and conjugative plasmids. Additional suitable vectors will be apparent to those of skill in the art based on the instant disclosure.

### Wild Type

[0342] As used herein the term “wild type” is a term of the art understood by skilled persons and means the typical form of an organism, strain, gene or characteristic as it occurs in nature as distinguished from mutant or variant forms.

### 5′ Endogenous DNA Flap

[0343] As used herein, the term “5′ endogenous DNA flap” refers to the strand of DNA situated immediately downstream of the PE-induced nick site in the target DNA. The nicking of the target DNA strand by PE exposes a 3′ hydroxyl group on the upstream side of the nick site and a 5′ hydroxyl group on the downstream side of the nick site. The endogenous strand ending in the 3′ hydroxyl group is used to prime the DNA polymerase of the prime editor (e.g., wherein the DNA polymerase is a reverse transcriptase). The endogenous strand on the downstream side of the nick site and which begins with the exposed 5′ hydroxyl group is referred to as the “5′ endogenous DNA flap” and is ultimately removed and replaced by the newly synthesized replacement strand (i.e., “3′ replacement DNA flap”) the encoded by the extension of the pegRNA.

### 5′ Endogenous DNA Flap Removal

[0344] As used herein, the term “5′ endogenous DNA flap removal” or “5′ flap removal” refers to the removal of the 5′ endogenous DNA flap that forms when the RT-synthesized single-strand DNA flap competitively invades and hybridizes to the endogenous DNA, displacing the endogenous strand in the process. Removing this endogenous displaced strand can drive the reaction towards the formation of the desired product comprising the desired nucleotide change. The cell's own DNA repair enzymes may catalyze the removal or excision of the 5′ endogenous flap (e.g., a flap endonuclease, such as EXO1 or FEN1). Also, host cells may be transformed to express one or more enzymes that catalyze the removal of said 5′ endogenous flaps, thereby driving the process toward product formation (e.g., a flap endonuclease). Flap endonucleases are known in the art and can be found described in Patel et al., “Flap endonucleases pass 5′-flaps through a flexible arch using a disorder-thread-order mechanism to confer specificity for free 5′-ends,” Nucleic Acids Research, 2012, 40(10): 4507-4519 and Tsutakawa et al., “Human flap endonuclease structures, DNA double-base flipping, and a unified understanding of the FEN1 superfamily,” Cell, 2011, 145(2): 198-211 (each of which are incorporated herein by reference).

### 3′ Replacement DNA Flap

[0345] As used herein, the term “3′ replacement DNA flap” or simply, “replacement DNA flap,” refers to the strand of DNA that is synthesized by the prime editor and which is encoded by the extension arm of the prime editor pegRNA. More in particular, the 3′ replacement DNA flap is encoded by the polymerase template of the pegRNA. The 3′ replacement DNA flap comprises the same sequence as the 5′ endogenous DNA flap except that it also contains the edited sequence (e.g., single nucleotide change). The 3′ replacement DNA flap anneals to the target DNA, displacing or replacing the 5′ endogenous DNA flap (which can be excised, for example, by a 5′ flap endonuclease, such as FEN1 or EXO1) and then is ligated to join the 3′ end of the 3′ replacement DNA flap to the exposed 5′ hydroxyl end of endogenous DNA (exposed after excision of the 5′ endogenous DNA flap, thereby reforming a phosphodiester bond and installing the 3′ replacement DNA flap to form a heteroduplex DNA containing one edited strand and one unedited strand. DNA repair processes resolve the heteroduplex by copying the information in the edited strand to the complementary strand permanently installs the edit in to the DNA. This resolution process can be driven further to completion by nicking the unedited strand, i.e., by way of “second-strand nicking,” as described herein.

[0346] The terms “cleavage site,” “nick site,” and “cut site” as used interchangeably herein in the context of prime editing, refer to a specific position in between two nucleotides or two base pairs in the double-stranded target DNA sequence. In some embodiments, the position of a nick site is determined relative to the position of a specific PAM sequence. In some embodiments, the nick site is the particular position where a nick will occur when the double stranded target DNA is contacted with a napDNAbp, e.g., a nickase such as a Cas nickase, that recognizes a specific PAM sequence. For each PEgRNA described herein, a nick site is characteristic of the particular napDNAbp to which the gRNA core of the PEgRNA associates with, and is characteristic of the particular PAM required for recognition and function of the napDNAbp. For example, for a PEgRNA that comprises a gRNA core that associates with a SpCas9, the nick site in the phosphodiester bond between bases three (“−3” position relative to the position 1 of the PAM sequence) and four (“−4” position relative to position 1 of the PAM sequence).

[0347] In some embodiments, a nick site is in a target strand of the double-stranded target DNA sequence. In some embodiments, a nick site is in a non-target strand of the double-stranded target DNA sequence. In some embodiments, the nick site is in a protospacer sequence. In some embodiments, the nick site is adjacent to a protospacer sequence. In some embodiments, a nick site is downstream of a region, e.g., on a non-target strand, that is complementary to a primer binding site of a PEgRNA. In some embodiments, a nick site is downstream of a region, e.g., on a non-target strand, that binds to a primer binding site of a PEgRNA. In some embodiments, a nick site is immediately downstream of a region, e.g., on a non-target strand, that is complementary to a primer binding site of a PEgRNA. In some embodiments, the nick site is upstream of a specific PAM sequence on the non-target strand of the double stranded target DNA, wherein the PAM sequence is specific for recognition by a napDNAbp that associates with the gRNA core of a PEgRNA. In some embodiments, the nick site is downstream of a specific PAM sequence on the non-target strand of the double stranded target DNA. wherein the PAM sequence is specific for recognition by a napDNAbp that associates with the gRNA core of a PEgRNA. In some embodiments, the nick site is 3 nucleotides upstream of the PAM sequence, and the PAM sequence is recognized by a Streptococcus pyogenes Cas9 nickase, a P. lavamentivorans Cas9 nickase, a C. diphtheriae Cas9 nickase, a N. cinerea Cas9, a S. aureus Cas9, or a N. lari Cas9 nickase. In some embodiments, the nick site is 3 nucleotides upstream of the PAM sequence, and the PAM sequence is recognized by a Cas9 nickase, wherein the Cas9 nickase comprises a nuclease active HNH domain and a nuclease inactive RuvC domain. In some embodiments, the nick site is 2 base pairs upstream of the PAM sequence, and the PAM sequence is recognized by a S. thermophilus Cas9 nickase.

### DETAILED DESCRIPTION OF CERTAIN EMBODIMENTS

[0348] The present disclosure provides next-generation modified pegRNAs with improved properties, including but not limited to, increased stability, increased lifespan in vivo, and/or improved binding affinity for a napDNAbp. These modified pegRNAs result in improved activity and/or efficiency of prime editing when used in conjunction with a prime editor, such as a fusion protein comprising a Cas9 nickase domain and a reverse transcriptase domain. In particular, the inventors have discovered that pegRNAs may suffer from various deficiencies, including reduced affinity to a nucleic acid programmable DNA binding protein (e.g., a Cas9 nickase), increased susceptibility to degradation relative to canonical single guide RNAs (sgRNAs) (in particular, degradation of the extension arm), and tendency toward inactivation due to unwanted duplex formation between the extension arm (and specifically, the primer binding site of the extension arm) and the spacer sequence in the pegRNA, thereby competing against the binding of the pegRNA's spacer and primer binding site to the strands of a target DNA. Without being bound by theory, these issues arise because of the presence of the extension arm feature that is an integral part of the pegRNA which is not present in canonical sgRNAs. To overcome these deficiencies, the present inventors have discovered that pegRNAs may be modified in one or more several ways to improve their overall stability and/or performance in prime editing. First, the inventors have discovered that appending one or more RNA structural motif's to a pegRNA can protect against degradation of the pegRNA. Such RNA structural motifs can include, but are not limited to (i) a prequeosine1-1 riboswitch aptamer (evopreQ1) and variants thereof, (ii) a frameshifting pseudoknot from Moloney murine leukemia virus (MMLV)22, hereafter referred to as “mpknot,” and variants thereof (iii) G-quadruplexes, (iv) hairpin structures (e.g., 15-bp hairpins), (v) xrRNA, and (vi) a P4-P6 domain of the group I intron. Second, the inventors have discovered various ways to reduce the formation of a duplex between the primer binding site (PBS) of the extension arm and the spacer sequence of the pegRNA (i.e., reducing the PBS/spacer binding interaction). In one embodiment, PBS/spacer binder interaction is avoided by stabilizing the 3′ extension arm, including but not limited to (i) occluding the PBS with toeholds that dissociate upon napDNAbp (e.g., Cas9 nickase) binding, (ii) providing the 3′ extension arm in trans, i.e., moving the 3′ extension arm or portion thereof (e.g, PBS and/or PBS and the DNA template portions) from the pegRNA to another molecule, e.g., the nicking gRNA, and (iii) introduction of chemical modifications to pegRNA that favor RNA/DNA duplex formation but disfavor RNA/RNA duplex formation, thereby promoting the desired interaction between the PBS of the pegRNA and the target DNA. Collectively, the modified pegRNAs disclosed herein resulting from the implementation of these strategies are referred to herein as “engineered” pegRNAs or “epegRNAs” or equivalently as “modified pegRNAs.”

[0349] In addition, the disclosure provides prime editing complexes comprising a prime editor complexed with an engineered pegRNA disclosed herein, as well as to nucleotide sequences and expression vectors encoding said engineered pegRNAs and prime editing complexes comprising the engineered pegRNAs. Still further, the disclosure provides genome editing methods based on prime editing that involve the use of the herein disclosed prime editing fusion protein complexed with the engineered pegRNAs to install desired nucleotide sequence changes at desired sites in a genome characterized by an editing efficiency that is higher than prime editing that uses canonical pegRNAs (i.e., those pegRNAs not modified in the manner described herein). The disclosure also provides cells and kits comprising the herein disclosed modified pegRNAs, or prime editing complexes comprising said modified pegRNAs. The present disclosure also provides methods of making the disclosed modified pegRNAs comprising coupling one or more structural nucleotide motifs (e.g., an evopreQ₁-1, evopreQ₁-1, or a modified MMLV tRNA) to the terminus of the extension arm of a pegRNA, optionally through a nucleotide linker. The disclosure further provides methods for delivery of the modified pegRNAs and prime editor components to target cells for conducting genome editing at a desired edit site, as well as, methods for treating genetic disorders using prime editing in combination with the herein disclosed modified pegRNAs.

### [1] Prime Editing

[0350] The present invention relates to an improved version of “prime editing” that utilizes modified or equivalently, engineered pegRNAs which are engineered to comprise one or more structural modifications that improve one or more characteristics, including their stability, cellular lifespan, affinity for Cas9 (or more broadly, to a napDNAbp), or interaction with a target DNA (e.g., improved interaction between the primer binding site and the target DNA) thereby increasing the editing efficiency of prime editing. The inventors developed prime editing as a “search and replace” genome editing tool, which is further described in Anzalone et al., “Search-and-replace genome editing without double-strand breaks or donor DNA,” Nature, Oct. 21, 2019, 576, pp. 149-157, the contents of which are incorporated herein by reference in their entirety.

[0351] Prime editing is a versatile and precise genome editing method that directly writes new genetic information into a specified DNA site using a nucleic acid programmable DNA binding protein (“napDNAbp”) working in association with a polymerase (i.e., in the form of a fusion protein or otherwise provided in trans with the napDNAbp), wherein the prime editing system is programmed with a prime editing (PE) guide RNA (“pegRNA”) (or as in the instant disclosure, programmed with an engineered pegRNA) that both specifies the target site and templates the synthesis of the desired edit in the form of a replacement DNA strand by way of an extension (either DNA or RNA) engineered onto a guide RNA (e.g., at the 5′ or 3′ end, or at an internal portion of a guide RNA). The replacement strand containing the desired edit (e.g., a single nucleobase substitution, deletion, or insertion) shares the same sequence as the endogenous strand of the target site to be edited (with the exception that it includes the desired edit). Through DNA repair and/or replication machinery, the endogenous strand of the target site is replaced by the newly synthesized replacement strand containing the desired edit. In some cases, prime editing may be thought of as a “search-and-replace” genome editing technology since the prime editors, as described herein, not only search and locate the desired target site to be edited, but at the same time, encode a replacement strand containing a desired edit which is installed in place of the corresponding target site endogenous DNA strand.

[0352] In various embodiments, prime editing operates by contacting a target DNA molecule (for which a change in the nucleotide sequence is desired to be introduced) with a nucleic acid programmable DNA binding protein (napDNAbp) complexed with a pegRNA (or an engineered epegRNA as in the instant disclosure). In reference to FIG. 1G, the pegRNA (or epegRNA) comprises an extension at the 3′ or 5′ end of the guide RNA, or at an intramolecular location in the guide RNA and encodes the desired nucleotide change (e.g., single nucleotide change, insertion, or deletion). In step (a), the napDNAbp/pegRNA complex (or napDNAbp/epegRNA complex as in the instant disclosure) contacts the DNA molecule and the e/pegRNA guides the napDNAbp to bind to a target locus. In step (b), a nick in one of the strands of DNA of the target locus is introduced (e.g., by a nuclease or chemical agent), thereby creating an available 3′ end in one of the strands of the target locus. In certain embodiments, the nick is created in the strand of DNA that corresponds to the R-loop strand, i.e., the strand that is not hybridized to the guide RNA sequence, i.e., the “non-target strand.” The nick, however, could be introduced in either of the strands. That is, the nick could be introduced into the R-loop “target strand” (i.e., the strand hybridized to the spacer sequence of the pegRNA) or the “non-target strand” (i.e., the strand forming the single-stranded portion of the R-loop and which is complementary to the target strand). In step (c), the 3′ end of the DNA strand (formed by the nick) interacts with the extended portion of the guide RNA in order to prime reverse transcription (i.e., “target-primed RT”). In certain embodiments, the 3′ end DNA strand hybridizes to a specific RT priming sequence on the extended portion of the guide RNA, i.e., the “reverse transcriptase priming sequence.” In step (d), a reverse transcriptase is introduced (as a fusion protein with the napDNAbp or in trans) which synthesizes a single strand of DNA from the 3′ end of the primed site towards the 5′ end of the e/pegRNA. This forms a single-strand DNA flap comprising the desired nucleotide change (e.g., the single base change, insertion, or deletion, or a combination thereof) and which is otherwise homologous to the endogenous DNA at or adjacent to the nick site. In step (e), the napDNAbp and e/pegRNA are released. Steps (f) and (g) relate to the resolution of the single strand DNA flap such that the desired nucleotide change becomes incorporated into the target locus. This process can be driven towards the desired product formation by removing the corresponding 5′ endogenous DNA flap (e.g., by FEN1 or similar enzyme that is provided in trans, as a fusion with the prime editor, or endogenously provided) that forms once the 3′ single strand DNA flap invades and hybridizes to the endogenous DNA sequence. Without being bound by theory, the cell's endogenous DNA repair and replication processes resolves the mismatched DNA to incorporate the nucleotide change(s) to form the desired altered product. The process can also be driven towards product formation with “second strand nicking,” as exemplified in FIG. 1G, or “temporal second strand nicking,” as exemplified in FIG. 1I and discussed herein.

[0353] In another embodiment of prime editing, FIG. 3F depicts the interaction of a typical pegRNA (which may be substituted with a epegRNA disclosed herein) with a target site of a double stranded DNA and the concomitant production of a 3′ single stranded DNA flap containing the genetic change of interest. The double strand DNA is shown with the top strand in the 3′ to 5′ orientation and the lower strand in the 5′ to 3′ direction. The top strand comprises the “protospacer” and the PAM sequence and is referred to as the “target strand.” The complementary lower strand is referred to as the “non-target strand.” Although not shown, the pegRNA depicted would be complexed with a Cas9 or equivalent. As shown in the schematic, the spacer sequence of the pegRNA anneals to a complementary region on the target strand, which is referred to as the protospacer, which is located just downstream of the PAM sequence and is approximately 20 nucleotides in length. This interaction forms a DNA/RNA hybrid between the spacer RNA and the protospacer DNA, and induces the formation of an R loop in the region opposite the protospacer. As taught elsewhere herein, the Cas9 protein (not shown) then induces a nick in the non-target strand, as shown. This then leads to the formation of the 3′ ssDNA flap region which, in accordance with *z*, interacts with the 3′ end of the pegRNA at the primer binding site. The 3′ end of the ssDNA flap (i.e., the reverse transcriptase primer sequence) anneals to the primer binding site (A) on the pegRNA, thereby priming reverse transcriptase. Next, reverse transcriptase (e.g., provided in trans or provided cis as a fusion protein, attached to the Cas9 construct) then polymerizes a single strand of DNA which is coded for by the edit template (B) and homology arm (C) (together which constitute the DNA synthesis template). The polymerization continues towards the 5′ end of the extension arm. The polymerized strand of ssDNA forms a ssDNA 3′ end flap which, as described elsewhere (e.g., as shown in FIG. 1G), invades the endogenous DNA, displacing the corresponding endogenous strand (which is removed as a 5′ DNA flap of endogenous DNA), and installing the desired nucleotide edit (single nucleotide base pair change, deletions, insertions (including whole genes) through DNA repair/replication rounds.

[0354] In various embodiments, prime editors rely on the mechanism of prime editing (e.g., as depicted in various embodiments of FIGS. 1A-1F). In various embodiments, prime editors comprise Cas protein-reverse transcriptase fusions or related systems to target a specific DNA sequence with a guide RNA, generate a single strand nick at the target site, and use the nicked DNA as a primer for reverse transcription of an engineered reverse transcriptase template that is integrated with the guide RNA. The prime editors described herein are not limited to reverse transcriptases but may include the use of virtually any DNA polymerase. Indeed, while the application throughout may refer to prime editors with “reverse transcriptases,” it is set forth here that reverse transcriptases are only one type of DNA polymerase that may work with prime editing. Thus, where the specification mentions “reverse transcriptases,” the person having ordinary skill in the art should appreciate that any suitable DNA polymerase may be used in place of the reverse transcriptase. Thus, in one aspect, the prime editors may comprise Cas9 (or an equivalent napDNAbp) which is programmed to target a DNA sequence by associating it with a specialized guide RNA (i.e., pegRNA) containing a spacer sequence that anneals to a complementary protospacer in the target DNA. The specialized guide RNA also contains new genetic information in the form of an extension that encodes a replacement strand of DNA containing a desired genetic alteration which is used to replace a corresponding endogenous DNA strand at the target site. To transfer information from the pegRNA to the target DNA, the mechanism of prime editing involves nicking the target site in one strand of the DNA to expose a 3′-hydroxyl group. The exposed 3′-hydroxyl group can then be used to prime the DNA polymerization of the edit-encoding extension on pegRNA directly into the target site. In various embodiments, the extension—which provides the template for polymerization of the replacement strand containing the edit—can be formed from RNA or DNA. In the case of an RNA extension, the polymerase of the prime editor can be an RNA-dependent DNA polymerase (such as, a reverse transcriptase). In the case of a DNA extension, the polymerase of the prime editor may be a DNA-dependent DNA polymerase.

[0355] The newly synthesized strand (i.e., the replacement DNA strand containing the desired edit) that is formed by the herein disclosed prime editors would be homologous to the genomic target sequence (i.e., have the same sequence as) except for the inclusion of a desired nucleotide change (e.g., a single nucleotide change, a deletion, or an insertion, or a combination thereof). The newly synthesized (or replacement) strand of DNA may also be referred to as a single strand DNA flap, which would compete for hybridization with the complementary homologous endogenous DNA strand, thereby displacing the corresponding endogenous strand. In certain embodiments, the system can be combined with the use of an error-prone reverse transcriptase enzyme (e.g., provided as a fusion protein with the Cas9 domain, or provided in trans to the Cas9 domain). The error-prone reverse transcriptase enzyme can introduce alterations during synthesis of the single strand DNA flap. Thus, in certain embodiments, error-prone reverse transcriptase can be utilized to introduce nucleotide changes to the target DNA. Depending on the error-prone reverse transcriptase that is used with the system, the changes can be random or non-random.

[0356] Resolution of the hybridized intermediate (comprising the single strand DNA flap synthesized by the reverse transcriptase hybridized to the endogenous DNA strand) can include removal of the resulting displaced flap of endogenous DNA (e.g., with a 5′ end DNA flap endonuclease, FEN1), ligation of the synthesized single strand DNA flap to the target DNA, and assimilation of the desired nucleotide change as a result of cellular DNA repair and/or replication processes. Because templated DNA synthesis offers single nucleotide precision for the modification of any nucleotide, including insertions and deletions, the scope of this approach is very broad and could foreseeably be used for myriad applications in basic science and therapeutics.

[0357] In each of these embodiments of prime editing, the modified or engineered pegRNAs described herein can be used in place of the canonical pegRNAs to increase the editing efficiency of prime editing. Without being bound by theory, the increased editing efficiency is believed to be derived from any one or more of improved pegRNA stability, improved cellular lifespan of pegRNAs, increased binding affinity of Cas9 to pegRNA, or reduced binding interaction between the primer binding site and the spacer of the epegRNA (and consequently a better interaction between the primer binding site and the target DNA).

[0358] This Detailed Description now describes the various components of prime editors contemplated herein and which may be used along with the modified or engineered pegRNAs described herein to increase the editing efficiency of prime editing.

[2] napDNAbp

[0359] The prime editors described herein may comprise a nucleic acid programmable DNA binding protein (napDNAbp).

[0360] In one aspect, a napDNAbp can be associated with or complexed with at least one guide nucleic acid (e.g., guide RNA or a pegRNA), which localizes the napDNAbp to a DNA sequence that comprises a DNA strand (i.e., a target strand) that is complementary to the guide nucleic acid, or a portion thereof (e.g., the spacer of a guide RNA which anneals to the protospacer of the DNA target). In other words, the guide nucleic-acid “programs” the napDNAbp (e.g., Cas9 or equivalent) to localize and bind to complementary sequence of the protospacer in the DNA.

[0361] Any suitable napDNAbp may be used in the prime editors described herein. In various embodiments, the napDNAbp may be any Class 2 CRISPR-Cas system, including any type II, type V, or type VI CRISPR-Cas enzyme. Given the rapid development of CRISPR-Cas as a tool for genome editing, there have been constant developments in the nomenclature used to describe and/or identify CRISPR-Cas enzymes, such as Cas9 and Cas9 orthologs. This application references CRISPR-Cas enzymes with nomenclature that may be old and/or new. The skilled person will be able to identify the specific CRISPR-Cas enzyme being referenced in this Application based on the nomenclature that is used, whether it is old (i.e., “legacy”) or new nomenclature. CRISPR-Cas nomenclature is extensively discussed in Makarova et al., “Classification and Nomenclature of CRISPR-Cas Systems: Where from Here?,” The CRISPR Journal, Vol. 1. No. 5, 2018, the entire contents of which are incorporated herein by reference. The particular CRISPR-Cas nomenclature used in any given instance in this Application is not limiting in any way and the skilled person will be able to identify which CRISPR-Cas enzyme is being referenced.

[0362] For example, the following type II, type V, and type VI Class 2 CRISPR-Cas enzymes have the following art-recognized old (i.e., legacy) and new names. Each of these enzymes, and/or variants thereof, may be used with the prime editors described herein:

| | |
|---|---|
| Legacy nomenclature | Current nomenclature* |

type II CRISPR-Cas enzymes

| | |
|---|---|
| Cas9 | same |

type V CRISPR-Cas enzymes

| | |
|---|---|
| Cpf1 | Cas12a |
| CasX | Cas12e |
| C2c1 | Cas12b1 |
| Cas12b2 | same |
| C2c3 | Cas12c |
| CasY | Cas12d |
| C2c4 | same |
| C2c8 | same |
| C2c5 | same |
| C2c10 | same |
| C2c9 | same |

type VI CRISPR-Cas enzymes

| | |
|---|---|
| C2c2 | Cas13a |
| Cas13d | same |
| C2c7 | Cas13c |
| C2c6 | Cas13b |

*See Makarova et al., The CRISPR Journal, Vol. 1, No. 5, 2018

[0363] Without being bound by theory, the mechanism of action of certain napDNAbp contemplated herein includes the step of forming an R-loop whereby the napDNAbp induces the unwinding of a double-strand DNA target, thereby separating the strands in the region bound by the napDNAbp. The guide RNA spacer then hybridizes to the “target strand” at a region that is complementary to the protospacer sequence. This displaces a “non-target strand” that is complementary to the target strand, which forms the single strand region of the R-loop. In some embodiments, the napDNAbp includes one or more nuclease activities, which then cut the DNA leaving various types of lesions. For example, the napDNAbp may comprises a nuclease activity that cuts the non-target strand at a first location, and/or cuts the target strand at a second location. Depending on the nuclease activity, the target DNA can be cut to form a “double-stranded break” whereby both strands are cut. In other embodiments, the target DNA can be cut at only a single site, i.e., the DNA is “nicked” on one strand. Exemplary napDNAbp with different nuclease activities include “Cas9 nickase” (“nCas9”) and a deactivated Cas9 having no nuclease activities (“dead Cas9” or “dCas9”).

[0364] The below description of various napDNAbps which can be used in connection with the presently disclosed prime editors is not meant to be limiting in any way. The prime editors may comprise the canonical SpCas9, or any ortholog Cas9 protein, or any variant Cas9 protein—including any naturally occurring variant, mutant, or otherwise engineered version of Cas9—that is known or which can be made or evolved through a directed evolutionary or otherwise mutagenic process. In various embodiments, the Cas9 or Cas9 variants have a nickase activity, i.e., only cleave one strand of the target DNA sequence. In other embodiments, the Cas9 or Cas9 variants have inactive nucleases, i.e., are “dead” Cas9 proteins. Other variant Cas9 proteins that may be used are those having a smaller molecular weight than the canonical SpCas9 (e.g., for easier delivery) or having modified or rearranged primary amino acid structure (e.g., the circular permutant formats).

[0365] The prime editors described herein may also comprise Cas9 equivalents, including Cas12a (Cpf1) and Cas12b1 proteins which are the result of convergent evolution. The napDNAbps used herein (e.g., SpCas9, Cas9 variant, or Cas9 equivalents) may also may also contain various modifications that alter/enhance their PAM specificities. Lastly, the application contemplates any Cas9, Cas9 variant, or Cas9 equivalent which has at least 70%, at least 75%, at least 80%, at least 85%, at least 90%, at least 91%, at least 92%, at least 93%, at least 94%, at least 95%, at least 96%, at least 97%, at least 98%, at least 99%, or at least 99.9% sequence identity to a reference Cas9 sequence, such as a reference SpCas9 canonical sequence or a reference Cas9 equivalent (e.g., Cas12a (Cpf1)).

[0366] The napDNAbp can be a CRISPR (clustered regularly interspaced short palindromic repeat)-associated nuclease. As outlined above, CRISPR is an adaptive immune system that provides protection against mobile genetic elements (viruses, transposable elements and conjugative plasmids). CRISPR clusters contain spacers, sequences complementary to antecedent mobile elements, and target invading nucleic acids. CRISPR clusters are transcribed and processed into CRISPR RNA (crRNA). In type II CRISPR systems correct processing of pre-crRNA requires a trans-encoded small RNA (tracrRNA), endogenous ribonuclease 3 (mc) and a Cas9 protein. The tracrRNA serves as a guide for ribonuclease 3-aided processing of pre-crRNA. Subsequently, Cas9/crRNA/tracrRNA endonucleolytically cleaves a linear or circular dsDNA target complementary to the spacer. The target strand not complementary to crRNA is first cut endonucleolytically, then trimmed 3′-5′ exonucleolytically. In nature, DNA-binding and cleavage typically requires protein and both RNAs. However, single guide RNAs (“sgRNA”, or simply “gRNA”) can be engineered so as to incorporate aspects of both the crRNA and tracrRNA into a single RNA species. See, e.g., Jinek M. et al., Science 337:816-821(2012), the entire contents of which is hereby incorporated by reference.

[0367] In some embodiments, the napDNAbp directs cleavage of one or both strands at the location of a target sequence, such as within the target sequence and/or within the complement of the target sequence. In some embodiments, the napDNAbp directs cleavage of one or both strands within about 1, 2, 3, 4, 5, 6, 7, 8, 9, 10, 15, 20, 25, 50, 100, 200, 500, or more base pairs from the first or last nucleotide of a target sequence. In some embodiments, a vector encodes a napDNAbp that is mutated to with respect to a corresponding wild-type enzyme such that the mutated napDNAbp lacks the ability to cleave one or both strands of a target polynucleotide containing a target sequence. For example, an aspartate-to-alanine substitution (D10A) in the RuvC I catalytic domain of Cas9 from S. pyogenes converts Cas9 from a nuclease that cleaves both strands to a nickase (cleaves a single strand). Other examples of mutations that render Cas9 a nickase include, without limitation, H840A, N854A, and N863A in reference to the canonical SpCas9 sequence, or to equivalent amino acid positions in other Cas9 variants or Cas9 equivalents.

[0368] As used herein, the term “Cas protein” refers to a full-length Cas protein obtained from nature, a recombinant Cas protein having a sequences that differs from a naturally occurring Cas protein, or any fragment of a Cas protein that nevertheless retains all or a significant amount of the requisite basic functions needed for the disclosed methods, i.e., (i) possession of nucleic-acid programmable binding of the Cas protein to a target DNA, and (ii) ability to nick the target DNA sequence on one strand. The Cas proteins contemplated herein embrace CRISPR Cas 9 proteins, as well as Cas9 equivalents, variants (e.g., Cas9 nickase (nCas9) or nuclease inactive Cas9 (dCas9)) homologs, orthologs, or paralogs, whether naturally occurring or non-naturally occurring (e.g., engineered or recombinant), and may include a Cas9 equivalent from any Class 2 CRISPR system (e.g., type II, V, VI), including Cas12a (Cpf1), Cas12e (CasX), Cas12b1 (C2c1), Cas12b2, Cas12c (C2c3), C2c4, C2c8, C2c5, C2c10, C2c9 Cas13a (C2c2), Cas13d, Cas13c (C2c7), Cas13b (C2c6), and Cas13b. Further Cas-equivalents are described in Makarova et al., “C2c2 is a single-component programmable RNA-guided RNA-targeting CRISPR effector,” Science 2016; 353(6299) and Makarova et al., “Classification and Nomenclature of CRISPR-Cas Systems: Where from Here?,” The CRISPR Journal, Vol. 1. No. 5, 2018, the contents of which are incorporated herein by reference.

[0369] The terms “Cas9” or “Cas9 nuclease” or “Cas9 moiety” or “Cas9 domain” embrace any naturally occurring Cas9 from any organism, any naturally-occurring Cas9 equivalent or functional fragment thereof, any Cas9 homolog, ortholog, or paralog from any organism, and any mutant or variant of a Cas9, naturally-occurring or engineered. The term Cas9 is not meant to be particularly limiting and may be referred to as a “Cas9 or equivalent.” Exemplary Cas9 proteins are further described herein and/or are described in the art and are incorporated herein by reference. The present disclosure is unlimited with regard to the particular Cas9 that is employed in the prime editors (PE) of the invention.

[0370] As noted herein, Cas9 nuclease sequences and structures are well known to those of skill in the art (see, e.g., “Complete genome sequence of an M1 strain of Streptococcus pyogenes.” Ferretti et al., J. J., McShan W. M., Ajdic D. J., Savic D. J., Savic G., Lyon K., Primeaux C., Sezate S., Suvorov A. N., Kenton S., Lai H. S., Lin S. P., Qian Y., Jia H. G., Najar F. Z., Ren Q., Zhu H., Song L., White J., Yuan X., Clifton S. W., Roe B. A., McLaughlin R. E., Proc. Natl. Acad. Sci. U.S.A. 98:4658-4663(2001); “CRISPR RNA maturation by trans-encoded small RNA and host factor RNase III.” Deltcheva E., Chylinski K., Sharma C. M., Gonzales K., Chao Y., Pirzada Z. A., Eckert M. R., Vogel J., Charpentier E., Nature 471:602-607(2011); and “A programmable dual-RNA-guided DNA endonuclease in adaptive bacterial immunity.” Jinek M., Chylinski K., Fonfara I., Hauer M., Doudna J. A., Charpentier E. Science 337:816-821(2012), the entire contents of each of which are incorporated herein by reference).

[0371] Examples of Cas9 and Cas9 equivalents are provided as follows; however, these specific examples are not meant to be limiting. The prime editors of the present disclosure may use any suitable napDNAbp, including any suitable Cas9 or Cas9 equivalent.

### A. Wild Type Canonical SpCas9

[0372] In one embodiment, the primer editor constructs described herein may comprise the “canonical SpCas9” nuclease from S. pyogenes, which has been widely used as a tool for genome engineering and is categorized as the type II subgroup of enzymes of the Class 2 CRISPR-Cas systems. This Cas9 protein is a large, multi-domain protein containing two distinct nuclease domains. Point mutations can be introduced into Cas9 to abolish one or both nuclease activities, resulting in a nickase Cas9 (nCas9) or dead Cas9 (dCas9), respectively, that still retains its ability to bind DNA in a sgRNA-programmed manner. In principle, when fused to another protein or domain, Cas9 or variant thereof (e.g., nCas9) can target that protein to virtually any DNA sequence simply by co-expression with an appropriate sgRNA. As used herein, the canonical SpCas9 protein refers to the wild type protein from Streptococcus pyogenes having the following amino acid sequence:

| Description | Sequence | SEQ ID NO: |
|---|---|---|
| SpCas9 | MDKKYSIGLDIGTNSVGWAVITDEYKVPSKKFKVLGN | SEQ ID NO: |
| Streptococcus | TDRHSIKKNLIGALLFDSGETAEATRLKRTARRRYTRR | 37 |
| pyogenes | KNRICYLQEIFSNEMAKVDDSFFHRLEESFLVEEDKKH | |
| M1 | ERHPIFGNIVDEVAYHEKYPTIYHLRKKLVDSTDKADL | |
| SwissProt | RLIYLALAHMIKFRGHFLIEGDLNPDNSDVDKLFIQLVQ | |
| Accession | TYNQLFEENPINASGVDAKAILSARLSKSRRLENLIAQL | |
| No. | PGEKKNGLFGNLIALSLGLTPNFKSNFDLAEDAKLQLS | |
| Q99ZW2 | KDTYDDDLDNLLAQIGDQYADLFLAAKNLSDAILLSDI | |
| Wild type | LRVNTEITKAPLSASMIKRYDEHHQDLTLLKALVRQQL | |
| | PEKYKEIFFDQSKNGYAGYIDGGASQEEFYKFIKPILEK | |
| | MDGTEELLVKLNREDLLRKQRTFDNGSIPHQIHLGELH | |
| | AILRRQEDFYPFLKDNREKIEKILTFRIPYYVGPLARGN | |
| | SRFAWMTRKSEETITPWNFEEVVDKGASAQSFIERMTN | |
| | FDKNLPNEKVLPKHSLLYEYFTVYNELTKVKYVTEGM | |
| | RKPAFLSGEQKKAIVDLLFKTNRKVTVKQLKEDYFKKI | |
| | ECFDSVEISGVEDRFNASLGTYHDLLKIIKDKDFLDNEE | |
| | NEDILEDIVLTLTLFEDREMIEERLKTYAHLFDDKVMK | |
| | QLKRRRYTGWGRLSRKLINGIRDKQSGKTILDFLKSDG | |
| | FANRNFMQLIHDDSLTFKEDIQKAQVSGQGDSLHEHIA | |
| | NLAGSPAIKKGILQTVKVVDELVKVMGRHKPENIVIEM | |
| | ARENQTTQKGQKNSRERMKRIEEGIKELGSQILKEHPV | |
| | ENTQLQNEKLYLYYLQNGRDMYVDQELDINRLSDYD | |
| | VDHIVPQSFLKDDSIDNKVLTRSDKNRGKSDNVPSEEV | |
| | VKKMKNYWRQLLNAKLITQRKFDNLTKAERGGLSEL | |
| | DKAGFIKRQLVETRQITKHVAQILDSRMNTKYDENDK | |
| | LIREVKVITLKSKLVSDFRKDFQFYKVREINNYHHAHD | |
| | AYLNAVVGTALIKKYPKLESEFVYGDYKVYDVRKMIA | |
| | KSEQEIGKATAKYFFYSNIMNFFKTEITLANGEIRKRPLI | |
| | ETNGETGEIVWDKGRDFATVRKVLSMPQVNIVKKTEV | |
| | QTGGFSKESILPKRNSDKLIARKKDWDPKKYGGFDSPT | |
| | VAYSVLVVAKVEKGKSKKLKSVKELLGITIMERSSFEK | |
| | NPIDFLEAKGYKEVKKDLIIKLPKYSLFELENGRKRML | |
| | ASAGELQKGNELALPSKYVNFLYLASHYEKLKGSPED | |
| | NEQKQLFVEQHKHYLDEIIEQISEFSKRVILADANLDKV | |
| | LSAYNKHRDKPIREQAENIIHLFTLTNLGAPAAFKYFDT | |
| | TIDRKRYTSTKEVLDATLIHQSITGLYETRIDLSQLGGD | |
| SpCas9 | ATGGATAAAAAATATAGCATTGGCCTGGATATTGGC | SEQ ID NO: |
| Reverse | ACCAACAGCGTGGGCTGGGCGGTGATTACCGATGAA | 38 |
| translation | TATAAAGTGCCGAGCAAAAAATTTAAAGTGCTGGGC | |
| of | AACACCGATCGCCATAGCATTAAAAAAAACCTGATT | |
| SwissProt | GGCGCGCTGCTGTTTGATAGCGGCGAAACCGCGGAA | |
| Accession | GCGACCCGCCTGAAACGCACCGCGCGCCGCCGCTAT | |
| No. | ACCCGCCGCAAAAACCGCATTTGCTATCTGCAGGAA | |
| Q99ZW2 | ATTTTTAGCAACGAAATGGCGAAAGTGGATGATAGC | |
| Streptococcus | TTTTTTCATCGCCTGGAAGAAAGCTTTCTGGTGGAAG | |
| pyogenes | AAGATAAAAAACATGAACGCCATCCGATTTTTGGCA | |
| | ACATTGTGGATGAAGTGGCGTATCATGAAAAATATC | |
| | CGACCATTTATCATCTGCGCAAAAAACTGGTGGATA | |
| | GCACCGATAAAGCGGATCTGCGCCTGATTTATCTGG | |
| | CGCTGGCGCATATGATTAAATTTCGCGGCCATTTTCT | |
| | GATTGAAGGCGATCTGAACCCGGATAACAGCGATGT | |
| | GGATAAACTGTTTATTCAGCTGGTGCAGACCTATAA | |
| | CCAGCTGTTTGAAGAAAACCCGATTAACGCGAGCGG | |
| | CGTGGATGCGAAAGCGATTCTGAGCGCGCGCCTGAG | |
| | CAAAAGCCGCCGCCTGGAAAACCTGATTGCGCAGCT | |
| | GCCGGGCGAAAAAAAAAACGGCCTGTTTGGCAACCT | |
| | GATTGCGCTGAGCCTGGGCCTGACCCCGAACTTTAA | |
| | AAGCAACTTTGATCTGGCGGAAGATGCGAAACTGCA | |
| | GCTGAGCAAAGATACCTATGATGATGATCTGGATAA | |
| | CCTGCTGGCGCAGATTGGCGATCAGTATGCGGATCT | |
| | GTTTCTGGCGGCGAAAAACCTGAGCGATGCGATTCT | |
| | GCTGAGCGATATTCTGCGCGTGAACACCGAAATTAC | |
| | CAAAGCGCCGCTGAGCGCGAGCATGATTAAACGCTA | |
| | TGATGAACATCATCAGGATCTGACCCTGCTGAAAGC | |
| | GCTGGTGCGCCAGCAGCTGCCGGAAAAATATAAAG | |
| | AAATTTTTTTTGATCAGAGCAAAAACGGCTATGCGG | |
| | GCTATATTGATGGCGGCGCGAGCCAGGAAGAATTTT | |
| | ATAAATTTATTAAACCGATTCTGGAAAAAATGGATG | |
| | GCACCGAAGAACTGCTGGTGAAACTGAACCGCGAA | |
| | GATCTGCTGCGCAAACAGCGCACCTTTGATAACGGC | |
| | AGCATTCCGCATCAGATTCATCTGGGCGAACTGCAT | |
| | GCGATTCTGCGCCGCCAGGAAGATTTTTATCCGTTTC | |
| | TGAAAGATAACCGCGAAAAAATTGAAAAAATTCTG | |
| | ACCTTTCGCATTCCGTATTATGTGGGCCCGCTGGCGC | |
| | GCGGCAACAGCCGCTTTGCGTGGATGACCCGCAAAA | |
| | GCGAAGAAACCATTACCCCGTGGAACTTTGAAGAAG | |
| | TGGTGGATAAAGGCGCGAGCGCGCAGAGCTTTATTG | |
| | AACGCATGACCAACTTTGATAAAAACCTGCCGAACG | |
| | AAAAAGTGCTGCCGAAACATAGCCTGCTGTATGAAT | |
| | ATTTTACCGTGTATAACGAACTGACCAAAGTGAAAT | |
| | ATGTGACCGAAGGCATGCGCAAACCGGCGTTTCTGA | |
| | GCGGCGAACAGAAAAAAGCGATTGTGGATCTGCTGT | |
| | TTAAAACCAACCGCAAAGTGACCGTGAAACAGCTGA | |
| | AAGAAGATTATTTTAAAAAAATTGAATGCTTTGATA | |
| | GCGTGGAAATTAGCGGCGTGGAAGATCGCTTTAACG | |
| | CGAGCCTGGGCACCTATCATGATCTGCTGAAAATTA | |
| | TTAAAGATAAAGATTTTCTGGATAACGAAGAAAACG | |
| | AAGATATTCTGGAAGATATTGTGCTGACCCTGACCC | |
| | TGTTTGAAGATCGCGAAATGATTGAAGAACGCCTGA | |
| | AAACCTATGCGCATCTGTTTGATGATAAAGTGATGA | |
| | AACAGCTGAAACGCCGCCGCTATACCGGCTGGGGCC | |
| | GCCTGAGCCGCAAACTGATTAACGGCATTCGCGATA | |
| | AACAGAGCGGCAAAACCATTCTGGATTTTCTGAAAA | |
| | GCGATGGCTTTGCGAACCGCAACTTTATGCAGCTGA | |
| | TTCATGATGATAGCCTGACCTTTAAAGAAGATATTC | |
| | AGAAAGCGCAGGTGAGCGGCCAGGGCGATAGCCTG | |
| | CATGAACATATTGCGAACCTGGCGGGCAGCCCGGCG | |
| | ATTAAAAAAGGCATTCTGCAGACCGTGAAAGTGGTG | |
| | GATGAACTGGTGAAAGTGATGGGCCGCCATAAACCG | |
| | GAAAACATTGTGATTGAAATGGCGCGCGAAAACCA | |
| | GACCACCCAGAAAGGCCAGAAAAACAGCCGCGAAC | |
| | GCATGAAACGCATTGAAGAAGGCATTAAAGAACTG | |
| | GGCAGCCAGATTCTGAAAGAACATCCGGTGGAAAA | |
| | CACCCAGCTGCAGAACGAAAAACTGTATCTGTATTA | |
| | TCTGCAGAACGGCCGCGATATGTATGTGGATCAGGA | |
| | ACTGGATATTAACCGCCTGAGCGATTATGATGTGGA | |
| | TCATATTGTGCCGCAGAGCTTTCTGAAAGATGATAG | |
| | CATTGATAACAAAGTGCTGACCCGCAGCGATAAAAA | |
| | CCGCGGCAAAAGCGATAACGTGCCGAGCGAAGAAG | |
| | TGGTGAAAAAAATGAAAAACTATTGGCGCCAGCTGC | |
| | TGAACGCGAAACTGATTACCCAGCGCAAATTTGATA | |
| | ACCTGACCAAAGCGGAACGCGGCGGCCTGAGCGAA | |
| | CTGGATAAAGCGGGCTTTATTAAACGCCAGCTGGTG | |
| | GAAACCCGCCAGATTACCAAACATGTGGCGCAGATT | |
| | CTGGATAGCCGCATGAACACCAAATATGATGAAAAC | |
| | GATAAACTGATTCGCGAAGTGAAAGTGATTACCCTG | |
| | AAAAGCAAACTGGTGAGCGATTTTCGCAAAGATTTT | |
| | CAGTTTTATAAAGTGCGCGAAATTAACAACTATCAT | |
| | CATGCGCATGATGCGTATCTGAACGCGGTGGTGGGC | |
| | ACCGCGCTGATTAAAAAATATCCGAAACTGGAAAGC | |
| | GAATTTGTGTATGGCGATTATAAAGTGTATGATGTG | |
| | CGCAAAATGATTGCGAAAAGCGAACAGGAAATTGG | |
| | CAAAGCGACCGCGAAATATTTTTTTTATAGCAACAT | |
| | TATGAACTTTTTTAAAACCGAAATTACCCTGGCGAA | |
| | CGGCGAAATTCGCAAACGCCCGCTGATTGAAACCAA | |
| | CGGCGAAACCGGCGAAATTGTGTGGGATAAAGGCC | |
| | GCGATTTTGCGACCGTGCGCAAAGTGCTGAGCATGC | |
| | CGCAGGTGAACATTGTGAAAAAAACCGAAGTGCAG | |
| | ACCGGCGGCTTTAGCAAAGAAAGCATTCTGCCGAAA | |
| | CGCAACAGCGATAAACTGATTGCGCGCAAAAAAGA | |
| | TTGGGATCCGAAAAAATATGGCGGCTTTGATAGCCC | |
| | GACCGTGGCGTATAGCGTGCTGGTGGTGGCGAAAGT | |
| | GGAAAAAGGCAAAAGCAAAAAACTGAAAAGCGTGA | |
| | AAGAACTGCTGGGCATTACCATTATGGAACGCAGCA | |
| | GCTTTGAAAAAAACCCGATTGATTTTCTGGAAGCGA | |
| | AAGGCTATAAAGAAGTGAAAAAAGATCTGATTATTA | |
| | AACTGCCGAAATATAGCCTGTTTGAACTGGAAAACG | |
| | GCCGCAAACGCATGCTGGCGAGCGCGGGCGAACTG | |
| | CAGAAAGGCAACGAACTGGCGCTGCCGAGCAAATA | |
| | TGTGAACTTTCTGTATCTGGCGAGCCATTATGAAAA | |
| | ACTGAAAGGCAGCCCGGAAGATAACGAACAGAAAC | |
| | AGCTGTTTGTGGAACAGCATAAACATTATCTGGATG | |
| | AAATTATTGAACAGATTAGCGAATTTAGCAAACGCG | |
| | TGATTCTGGCGGATGCGAACCTGGATAAAGTGCTGA | |
| | GCGCGTATAACAAACATCGCGATAAACCGATTCGCG | |
| | AACAGGCGGAAAACATTATTCATCTGTTTACCCTGA | |
| | CCAACCTGGGCGCGCCGGCGGCGTTTAAATATTTTG | |
| | ATACCACCATTGATCGCAAACGCTATACCAGCACCA | |
| | AAGAAGTGCTGGATGCGACCCTGATTCATCAGAGCA | |
| | TTACCGGCCTGTATGAAACCCGCATTGATCTGAGCC | |
| | AGCTGGGCGGCGAT | |

[0373] The prime editors described herein may include canonical SpCas9, or any variant thereof having at least 80%, at least 85%, at least 90%, at least 95%, or at least 99% sequence identity with a wild type Cas9 sequence provided above. These variants may include SpCas9 variants containing one or more mutations, including any known mutation reported with the SwissProt Accession No. Q99ZW2 (SEQ ID NO: 37) entry, which include:

| SpCas9 mutation (relative to the amino | Function/Characteristic (as reported) (see |
|---|---|
| acid sequence of the canonical SpCas9 | UniProtKB - Q99ZW2 (CAS9_STRPT1) entry - |
| sequence, SEQ ID NO: 37) | incorporated herein by reference) |
| D10A | Nickase mutant which cleaves the protospacer |
| | strand (but no cleavage of non-protospacer strand) |
| S15A | Decreased DNA cleavage activity |
| R66A | Decreased DNA cleavage activity |
| R70A | No DNA cleavage |
| R74A | Decreased DNA cleavage |
| R78A | Decreased DNA cleavage |
| 97-150 deletion | No nuclease activity |
| R165A | Decreased DNA cleavage |
| 175-307 deletion | About 50% decreased DNA cleavage |
| 312-409 deletion | No nuclease activity |
| E762A | Nickase |
| H840A | Nickase mutant which cleaves the non-protospacer |
| | strand but does not cleave the protospacer strand |
| N854A | Nickase |
| N863A | Nickase |
| H982A | Decreased DNA cleavage |
| D986A | Nickase |
| 1099-1368 deletion | No nuclease activity |
| R1333A | Reduced DNA binding |

[0374] Other wild type SpCas9 sequences that may be used in the present disclosure, include:

| Description | Sequence | SEQ ID NO: |
|---|---|---|
| SpCas9 | ATGGATAAGAAATACTCAATAGGCTTAGATATCGGCA | SEQ ID NO: |
| Streptococcus | CAAATAGCGTCGGATGGGCGGTGATCACTGATGATTA | 39 |
| pyogenes | TAAGGTTCCGTCTAAAAAGTTCAAGGTTCTGGGAAAT | |
| MGAS1882 | ACAGACCGCCACAGTATCAAAAAAAATCTTATAGGGG | |
| wild type | CTCTTTTATTTGGCAGTGGAGAGACAGCGGAAGCGAC | |
| NC_017053.1 | TCGTCTCAAACGGACAGCTCGTAGAAGGTATACACGT | |
| | CGGAAGAATCGTATTTGTTATCTACAGGAGATTTTTTC | |
| | AAATGAGATGGCGAAAGTAGATGATAGTTTCTTTCATC | |
| | GACTTGAAGAGTCTTTTTTGGTGGAAGAAGACAAGAA | |
| | GCATGAACGTCATCCTATTTTTGGAAATATAGTAGATG | |
| | AAGTTGCTTATCATGAGAAATATCCAACTATCTATCAT | |
| | CTGCGAAAAAAATTGGCAGATTCTACTGATAAAGCGG | |
| | ATTTGCGCTTAATCTATTTGGCCTTAGCGCATATGATT | |
| | AAGTTTCGTGGTCATTTTTTGATTGAGGGAGATTTAAA | |
| | TCCTGATAATAGTGATGTGGACAAACTATTTATCCAGT | |
| | TGGTACAAATCTACAATCAATTATTTGAAGAAAACCCT | |
| | ATTAACGCAAGTAGAGTAGATGCTAAAGCGATTCTTTC | |
| | TGCACGATTGAGTAAATCAAGACGATTAGAAAATCTC | |
| | ATTGCTCAGCTCCCCGGTGAGAAGAGAAATGGCTTGTT | |
| | TGGGAATCTCATTGCTTTGTCATTGGGATTGACCCCTA | |
| | ATTTTAAATCAAATTTTGATTTGGCAGAAGATGCTAAA | |
| | TTACAGCTTTCAAAAGATACTTACGATGATGATTTAGA | |
| | TAATTTATTGGCGCAAATTGGAGATCAATATGCTGATT | |
| | TGTTTTTGGCAGCTAAGAATTTATCAGATGCTATTTTA | |
| | CTTTCAGATATCCTAAGAGTAAATAGTGAAATAACTA | |
| | AGGCTCCCCTATCAGCTTCAATGATTAAGCGCTACGAT | |
| | GAACATCATCAAGACTTGACTCTTTTAAAAGCTTTAGT | |
| | TCGACAACAACTTCCAGAAAAGTATAAAGAAATCTTT | |
| | TTTGATCAATCAAAAAACGGATATGCAGGTTATATTGA | |
| | TGGGGGAGCTAGCCAAGAAGAATTTTATAAATTTATC | |
| | AAACCAATTTTAGAAAAAATGGATGGTACTGAGGAAT | |
| | TATTGGTGAAACTAAATCGTGAAGATTTGCTGCGCAA | |
| | GCAACGGACCTTTGACAACGGCTCTATTCCCCATCAAA | |
| | TTCACTTGGGTGAGCTGCATGCTATTTTGAGAAGACAA | |
| | GAAGACTTTTATCCATTTTTAAAAGACAATCGTGAGAA | |
| | GATTGAAAAAATCTTGACTTTTCGAATTCCTTATTATG | |
| | TTGGTCCATTGGCGCGTGGCAATAGTCGTTTTGCATGG | |
| | ATGACTCGGAAGTCTGAAGAAACAATTACCCCATGGA | |
| | ATTTTGAAGAAGTTGTCGATAAAGGTGCTTCAGCTCAA | |
| | TCATTTATTGAACGCATGACAAACTTTGATAAAAATCT | |
| | TCCAAATGAAAAAGTACTACCAAAACATAGTTTGCTTT | |
| | ATGAGTATTTTACGGTTTATAACGAATTGACAAAGGTC | |
| | AAATATGTTACTGAGGGAATGCGAAAACCAGCATTTC | |
| | TTTCAGGTGAACAGAAGAAAGCCATTGTTGATTTACTC | |
| | TTCAAAACAAATCGAAAAGTAACCGTTAAGCAATTAA | |
| | AAGAAGATTATTTCAAAAAAATAGAATGTTTTGATAG | |
| | TGTTGAAATTTCAGGAGTTGAAGATAGATTTAATGCTT | |
| | CATTAGGCGCCTACCATGATTTGCTAAAAATTATTAAA | |
| | GATAAAGATTTTTTGGATAATGAAGAAAATGAAGATA | |
| | TCTTAGAGGATATTGTTTTAACATTGACCTTATTTGAA | |
| | GATAGGGGGATGATTGAGGAAAGACTTAAAACATATG | |
| | CTCACCTCTTTGATGATAAGGTGATGAAACAGCTTAAA | |
| | CGTCGCCGTTATACTGGTTGGGGACGTTTGTCTCGAAA | |
| | ATTGATTAATGGTATTAGGGATAAGCAATCTGGCAAA | |
| | ACAATATTAGATTTTTTGAAATCAGATGGTTTTGCCAA | |
| | TCGCAATTTTATGCAGCTGATCCATGATGATAGTTTGA | |
| | CATTTAAAGAAGATATTCAAAAAGCACAGGTGTCTGG | |
| | ACAAGGCCATAGTTTACATGAACAGATTGCTAACTTA | |
| | GCTGGCAGTCCTGCTATTAAAAAAGGTATTTTACAGAC | |
| | TGTAAAAATTGTTGATGAACTGGTCAAAGTAATGGGG | |
| | CATAAGCCAGAAAATATCGTTATTGAAATGGCACGTG | |
| | AAAATCAGACAACTCAAAAGGGCCAGAAAAATTCGCG | |
| | AGAGCGTATGAAACGAATCGAAGAAGGTATCAAAGA | |
| | ATTAGGAAGTCAGATTCTTAAAGAGCATCCTGTTGAA | |
| | AATACTCAATTGCAAAATGAAAAGCTCTATCTCTATTA | |
| | TCTACAAAATGGAAGAGACATGTATGTGGACCAAGAA | |
| | TTAGATATTAATCGTTTAAGTGATTATGATGTCGATCA | |
| | CATTGTTCCACAAAGTTTCATTAAAGACGATTCAATAG | |
| | ACAATAAGGTACTAACGCGTTCTGATAAAAATCGTGG | |
| | TAAATCGGATAACGTTCCAAGTGAAGAAGTAGTCAAA | |
| | AAGATGAAAAACTATTGGAGACAACTTCTAAACGCCA | |
| | AGTTAATCACTCAACGTAAGTTTGATAATTTAACGAAA | |
| | GCTGAACGTGGAGGTTTGAGTGAACTTGATAAAGCTG | |
| | GTTTTATCAAACGCCAATTGGTTGAAACTCGCCAAATC | |
| | ACTAAGCATGTGGCACAAATTTTGGATAGTCGCATGA | |
| | ATACTAAATACGATGAAAATGATAAACTTATTCGAGA | |
| | GGTTAAAGTGATTACCTTAAAATCTAAATTAGTTTCTG | |
| | ACTTCCGAAAAGATTTCCAATTCTATAAAGTACGTGAG | |
| | ATTAACAATTACCATCATGCCCATGATGCGTATCTAAA | |
| | TGCCGTCGTTGGAACTGCTTTGATTAAGAAATATCCAA | |
| | AACTTGAATCGGAGTTTGTCTATGGTGATTATAAAGTT | |
| | TATGATGTTCGTAAAATGATTGCTAAGTCTGAGCAAGA | |
| | AATAGGCAAAGCAACCGCAAAATATTTCTTTTACTCTA | |
| | ATATCATGAACTTCTTCAAAACAGAAATTACACTTGCA | |
| | AATGGAGAGATTCGCAAACGCCCTCTAATCGAAACTA | |
| | ATGGGGAAACTGGAGAAATTGTCTGGGATAAAGGGCG | |
| | AGATTTTGCCACAGTGCGCAAAGTATTGTCCATGCCCC | |
| | AAGTCAATATTGTCAAGAAAACAGAAGTACAGACAGG | |
| | CGGATTCTCCAAGGAGTCAATTTTACCAAAAAGAAAT | |
| | TCGGACAAGCTTATTGCTCGTAAAAAAGACTGGGATC | |
| | CAAAAAAATATGGTGGTTTTGATAGTCCAACGGTAGC | |
| | TTATTCAGTCCTAGTGGTTGCTAAGGTGGAAAAAGGG | |
| | AAATCGAAGAAGTTAAAATCCGTTAAAGAGTTACTAG | |
| | GGATCACAATTATGGAAAGAAGTTCCTTTGAAAAAAA | |
| | TCCGATTGACTTTTTAGAAGCTAAAGGATATAAGGAA | |
| | GTTAAAAAAGACTTAATCATTAAACTACCTAAATATA | |
| | GTCTTTTTGAGTTAGAAAACGGTCGTAAACGGATGCTG | |
| | GCTAGTGCCGGAGAATTACAAAAAGGAAATGAGCTGG | |
| | CTCTGCCAAGCAAATATGTGAATTTTTTATATTTAGCT | |
| | AGTCATTATGAAAAGTTGAAGGGTAGTCCAGAAGATA | |
| | ACGAACAAAAACAATTGTTTGTGGAGCAGCATAAGCA | |
| | TTATTTAGATGAGATTATTGAGCAAATCAGTGAATTTT | |
| | CTAAGCGTGTTATTTTAGCAGATGCCAATTTAGATAAA | |
| | GTTCTTAGTGCATATAACAAACATAGAGACAAACCAA | |
| | TACGTGAACAAGCAGAAAATATTATTCATTTATTTACG | |
| | TTGACGAATCTTGGAGCTCCCGCTGCTTTTAAATATTT | |
| | TGATACAACAATTGATCGTAAACGATATACGTCTACA | |
| | AAAGAAGTTTTAGATGCCACTCTTATCCATCAATCCAT | |
| | CACTGGTCTTTATGAAACACGCATTGATTTGAGTCAGC | |
| | TAGGAGGTGACTGA | |
| SpCas9 | MDKKYSIGLDIGTNSVGWAVITDDYKVPSKKFKVLGNT | SEQ ID NO: |
| Streptococcus | DRHSIKKNLIGALLFGSGETAEATRLKRTARRRYTRRKN | 40 |
| pyogenes | RICYLQEIFSNEMAKVDDSFFHRLEESFLVEEDKKHERHP | |
| MGAS1882 | IFGNIVDEVAYHEKYPTIYHLRKKLADSTDKADLRLIYLA | |
| wild type | LAHMIKFRGHFLIEGDLNPDNSDVDKLFIQLVQIYNQLFE | |
| NC_017053.1 | ENPINASRVDAKAILSARLSKSRRLENLIAQLPGEKRNGL | |
| | FGNLIALSLGLTPNFKSNFDLAEDAKLQLSKDTYDDDLD | |
| | NLLAQIGDQYADLFLAAKNLSDAILLSDILRVNSEITKAP | |
| | LSASMIKRYDEHHQDLTLLKALVRQQLPEKYKEIFFDQS | |
| | KNGYAGYIDGGASQEEFYKFIKPILEKMDGTEELLVKLN | |
| | REDLLRKQRTFDNGSIPHQIHLGELHAILRRQEDFYPFLK | |
| | DNREKIEKILTFRIPYYVGPLARGNSRFAWMTRKSEETITP | |
| | WNFEEVVDKGASAQSFIERMTNFDKNLPNEKVLPKHSLL | |
| | YEYFTVYNELTKVKYVTEGMRKPAFLSGEQKKAIVDLLF | |
| | KTNRKVTVKQLKEDYFKKIECFDSVEISGVEDRFNASLG | |
| | AYHDLLKIIKDKDFLDNEENEDILEDIVLTLTLFEDRGMIE | |
| | ERLKTYAHLFDDKVMKQLKRRRYTGWGRLSRKLINGIR | |
| | DKQSGKTILDFLKSDGFANRNFMQLIHDDSLTFKEDIQKA | |
| | QVSGQGHSLHEQIANLAGSPAIKKGILQTVKIVDELVKV | |
| | MGHKPENIVIEMARENQTTQKGQKNSRERMKRIEEGIKE | |
| | LGSQILKEHPVENTQLQNEKLYLYYLQNGRDMYVDQEL | |
| | DINRLSDYDVDHIVPQSFIKDDSIDNKVLTRSDKNRGKSD | |
| | NVPSEEVVKKMKNYWRQLLNAKLITQRKFDNLTKAERG | |
| | GLSELDKAGFIKRQLVETRQITKHVAQILDSRMNTKYDE | |
| | NDKLIREVKVITLKSKLVSDFRKDFQFYKVREINNYHHA | |
| | HDAYLNAVVGTALIKKYPKLESEFVYGDYKVYDVRKMI | |
| | AKSEQEIGKATAKYFFYSNIMNFFKTEITLANGEIRKRPLI | |
| | ETNGETGEIVWDKGRDFATVRKVLSMPQVNIVKKTEVQ | |
| | TGGFSKESILPKRNSDKLIARKKDWDPKKYGGFDSPTVA | |
| | YSVLVVAKVEKGKSKKLKSVKELLGITIMERSSFEKNPID | |
| | FLEAKGYKEVKKDLIIKLPKYSLFELENGRKRMLASAGE | |
| | LQKGNELALPSKYVNFLYLASHYEKLKGSPEDNEQKQLF | |
| | VEQHKHYLDEIIEQISEFSKRVILADANLDKVLSAYNKHR | |
| | DKPIREQAENIIHLFTLTNLGAPAAFKYFDTTIDRKRYTST | |
| | KEVLDATLIHQSITGLYETRIDLSQLGGD | |
| SpCas9 | ATGGATAAAAAGTATTCTATTGGTTTAGACATCGGCAC | SEQ ID NO: |
| Streptococcus | TAATTCCGTTGGATGGGCTGTCATAACCGATGAATACA | 41 |
| pyogenes | AAGTACCTTCAAAGAAATTTAAGGTGTTGGGGAACAC | |
| wild type | AGACCGTCATTCGATTAAAAAGAATCTTATCGGTGCCC | |
| SWBC2D7W014 | TCCTATTCGATAGTGGCGAAACGGCAGAGGCGACTCG | |
| | CCTGAAACGAACCGCTCGGAGAAGGTATACACGTCGC | |
| | AAGAACCGAATATGTTACTTACAAGAAATTTTTAGCA | |
| | ATGAGATGGCCAAAGTTGACGATTCTTTCTTTCACCGT | |
| | TTGGAAGAGTCCTTCCTTGTCGAAGAGGACAAGAAAC | |
| | ATGAACGGCACCCCATCTTTGGAAACATAGTAGATGA | |
| | GGTGGCATATCATGAAAAGTACCCAACGATTTATCAC | |
| | CTCAGAAAAAAGCTAGTTGACTCAACTGATAAAGCGG | |
| | ACCTGAGGTTAATCTACTTGGCTCTTGCCCATATGATA | |
| | AAGTTCCGTGGGCACTTTCTCATTGAGGGTGATCTAAA | |
| | TCCGGACAACTCGGATGTCGACAAACTGTTCATCCAGT | |
| | TAGTACAAACCTATAATCAGTTGTTTGAAGAGAACCCT | |
| | ATAAATGCAAGTGGCGTGGATGCGAAGGCTATTCTTA | |
| | GCGCCCGCCTCTCTAAATCCCGACGGCTAGAAAACCT | |
| | GATCGCACAATTACCCGGAGAGAAGAAAAATGGGTTG | |
| | TTCGGTAACCTTATAGCGCTCTCACTAGGCCTGACACC | |
| | AAATTTTAAGTCGAACTTCGACTTAGCTGAAGATGCCA | |
| | AATTGCAGCTTAGTAAGGACACGTACGATGACGATCT | |
| | CGACAATCTACTGGCACAAATTGGAGATCAGTATGCG | |
| | GACTTATTTTTGGCTGCCAAAAACCTTAGCGATGCAAT | |
| | CCTCCTATCTGACATACTGAGAGTTAATACTGAGATTA | |
| | CCAAGGCGCCGTTATCCGCTTCAATGATCAAAAGGTA | |
| | CGATGAACATCACCAAGACTTGACACTTCTCAAGGCC | |
| | CTAGTCCGTCAGCAACTGCCTGAGAAATATAAGGAAA | |
| | TATTCTTTGATCAGTCGAAAAACGGGTACGCAGGTTAT | |
| | ATTGACGGCGGAGCGAGTCAAGAGGAATTCTACAAGT | |
| | TTATCAAACCCATATTAGAGAAGATGGATGGGACGGA | |
| | AGAGTTGCTTGTAAAACTCAATCGCGAAGATCTACTGC | |
| | GAAAGCAGCGGACTTTCGACAACGGTAGCATTCCACA | |
| | TCAAATCCACTTAGGCGAATTGCATGCTATACTTAGAA | |
| | GGCAGGAGGATTTTTATCCGTTCCTCAAAGACAATCGT | |
| | GAAAAGATTGAGAAAATCCTAACCTTTCGCATACCTTA | |
| | CTATGTGGGACCCCTGGCCCGAGGGAACTCTCGGTTCG | |
| | CATGGATGACAAGAAAGTCCGAAGAAACGATTACTCC | |
| | ATGGAATTTTGAGGAAGTTGTCGATAAAGGTGCGTCA | |
| | GCTCAATCGTTCATCGAGAGGATGACCAACTTTGACA | |
| | AGAATTTACCGAACGAAAAAGTATTGCCTAAGCACAG | |
| | TTTACTTTACGAGTATTTCACAGTGTACAATGAACTCA | |
| | CGAAAGTTAAGTATGTCACTGAGGGCATGCGTAAACC | |
| | CGCCTTTCTAAGCGGAGAACAGAAGAAAGCAATAGTA | |
| | GATCTGTTATTCAAGACCAACCGCAAAGTGACAGTTA | |
| | AGCAATTGAAAGAGGACTACTTTAAGAAAATTGAATG | |
| | CTTCGATTCTGTCGAGATCTCCGGGGTAGAAGATCGAT | |
| | TTAATGCGTCACTTGGTACGTATCATGACCTCCTAAAG | |
| | ATAATTAAAGATAAGGACTTCCTGGATAACGAAGAGA | |
| | ATGAAGATATCTTAGAAGATATAGTGTTGACTCTTACC | |
| | CTCTTTGAAGATCGGGAAATGATTGAGGAAAGACTAA | |
| | AAACATACGCTCACCTGTTCGACGATAAGGTTATGAA | |
| | ACAGTTAAAGAGGCGTCGCTATACGGGCTGGGGACGA | |
| | TTGTCGCGGAAACTTATCAACGGGATAAGAGACAAGC | |
| | AAAGTGGTAAAACTATTCTCGATTTTCTAAAGAGCGAC | |
| | GGCTTCGCCAATAGGAACTTTATGCAGCTGATCCATGA | |
| | TGACTCTTTAACCTTCAAAGAGGATATACAAAAGGCA | |
| | CAGGTTTCCGGACAAGGGGACTCATTGCACGAACATA | |
| | TTGCGAATCTTGCTGGTTCGCCAGCCATCAAAAAGGGC | |
| | ATACTCCAGACAGTCAAAGTAGTGGATGAGCTAGTTA | |
| | AGGTCATGGGACGTCACAAACCGGAAAACATTGTAAT | |
| | CGAGATGGCACGCGAAAATCAAACGACTCAGAAGGG | |
| | GCAAAAAAACAGTCGAGAGCGGATGAAGAGAATAGA | |
| | AGAGGGTATTAAAGAACTGGGCAGCCAGATCTTAAAG | |
| | GAGCATCCTGTGGAAAATACCCAATTGCAGAACGAGA | |
| | AACTTTACCTCTATTACCTACAAAATGGAAGGGACATG | |
| | TATGTTGATCAGGAACTGGACATAAACCGTTTATCTGA | |
| | TTACGACGTCGATCACATTGTACCCCAATCCTTTTTGA | |
| | AGGACGATTCAATCGACAATAAAGTGCTTACACGCTC | |
| | GGATAAGAACCGAGGGAAAAGTGACAATGTTCCAAGC | |
| | GAGGAAGTCGTAAAGAAAATGAAGAACTATTGGCGGC | |
| | AGCTCCTAAATGCGAAACTGATAACGCAAAGAAAGTT | |
| | CGATAACTTAACTAAAGCTGAGAGGGGTGGCTTGTCT | |
| | GAACTTGACAAGGCCGGATTTATTAAACGTCAGCTCGT | |
| | GGAAACCCGCCAAATCACAAAGCATGTTGCACAGATA | |
| | CTAGATTCCCGAATGAATACGAAATACGACGAGAACG | |
| | ATAAGCTGATTCGGGAAGTCAAAGTAATCACTTTAAA | |
| | GTCAAAATTGGTGTCGGACTTCAGAAAGGATTTTCAAT | |
| | TCTATAAAGTTAGGGAGATAAATAACTACCACCATGC | |
| | GCACGACGCTTATCTTAATGCCGTCGTAGGGACCGCAC | |
| | TCATTAAGAAATACCCGAAGCTAGAAAGTGAGTTTGT | |
| | GTATGGTGATTACAAAGTTTATGACGTCCGTAAGATGA | |
| | TCGCGAAAAGCGAACAGGAGATAGGCAAGGCTACAG | |
| | CCAAATACTTCTTTTATTCTAACATTATGAATTTCTTTA | |
| | AGACGGAAATCACTCTGGCAAACGGAGAGATACGCAA | |
| | ACGACCTTTAATTGAAACCAATGGGGAGACAGGTGAA | |
| | ATCGTATGGGATAAGGGCCGGGACTTCGCGACGGTGA | |
| | GAAAAGTTTTGTCCATGCCCCAAGTCAACATAGTAAA | |
| | GAAAACTGAGGTGCAGACCGGAGGGTTTTCAAAGGAA | |
| | TCGATTCTTCCAAAAAGGAATAGTGATAAGCTCATCGC | |
| | TCGTAAAAAGGACTGGGACCCGAAAAAGTACGGTGGC | |
| | TTCGATAGCCCTACAGTTGCCTATTCTGTCCTAGTAGT | |
| | GGCAAAAGTTGAGAAGGGAAAATCCAAGAAACTGAA | |
| | GTCAGTCAAAGAATTATTGGGGATAACGATTATGGAG | |
| | CGCTCGTCTTTTGAAAAGAACCCCATCGACTTCCTTGA | |
| | GGCGAAAGGTTACAAGGAAGTAAAAAAGGATCTCATA | |
| | ATTAAACTACCAAAGTATAGTCTGTTTGAGTTAGAAAA | |
| | TGGCCGAAAACGGATGTTGGCTAGCGCCGGAGAGCTT | |
| | CAAAAGGGGAACGAACTCGCACTACCGTCTAAATACG | |
| | TGAATTTCCTGTATTTAGCGTCCCATTACGAGAAGTTG | |
| | AAAGGTTCACCTGAAGATAACGAACAGAAGCAACTTT | |
| | TTGTTGAGCAGCACAAACATTATCTCGACGAAATCATA | |
| | GAGCAAATTTCGGAATTCAGTAAGAGAGTCATCCTAG | |
| | CTGATGCCAATCTGGACAAAGTATTAAGCGCATACAA | |
| | CAAGCACAGGGATAAACCCATACGTGAGCAGGCGGAA | |
| | AATATTATCCATTTGTTTACTCTTACCAACCTCGGCGCT | |
| | CCAGCCGCATTCAAGTATTTTGACACAACGATAGATCG | |
| | CAAACGATACACTTCTACCAAGGAGGTGCTAGACGCG | |
| | ACACTGATTCACCAATCCATCACGGGATTATATGAAAC | |
| | TCGGATAGATTTGTCACAGCTTGGGGGTGACGGATCCC | |
| | CCAAGAAGAAGAGGAAAGTCTCGAGCGACTACAAAG | |
| | ACCATGACGGTGATTATAAAGATCATGACATCGATTA | |
| | CAAGGATGACGATGACAAGGCTGCAGGA | |
| SpCas9 | MDKKYSIGLDIGTNSVGWAVITDEYKVPSKKFKVLGNTD | SEQ ID NO: |
| Streptococcus | RHSIKKNLIGALLFDSGETAEATRLKRTARRRYTRRKNRI | 42 |
| pyogenes | CYLQEIFSNEMAKVDDSFFHRLEESFLVEEDKKHERHPIF | |
| wild type | GNIVDEVAYHEKYPTIYHLRKKLVDSTDKADLRLIYLAL | |
| Encoded | AHMIKFRGHFLIEGDLNPDNSDVDKLFIQLVQTYNQLFEE | |
| product of | NPINASGVDAKAILSARLSKSRRLENLIAQLPGEKKNGLF | |
| SWBC2D7W014 | GNLIALSLGLTPNFKSNFDLAEDAKLQLSKDTYDDDLDN | |
| | LLAQIGDQYADLFLAAKNLSDAILLSDILRVNTEITKAPLS | |
| | ASMIKRYDEHHQDLTLLKALVRQQLPEKYKEIFFDQSKN | |
| | GYAGYIDGGASQEEFYKFIKPILEKMDGTEELLVKLNRE | |
| | DLLRKQRTFDNGSIPHQIHLGELHAILRRQEDFYPFLKDN | |
| | REKIEKILTFRIPYYVGPLARGNSRFAWMTRKSEETITPW | |
| | NFEEVVDKGASAQSFIERMTNFDKNLPNEKVLPKHSLLY | |
| | EYFTVYNELTKVKYVTEGMRKPAFLSGEQKKAIVDLLFK | |
| | TNRKVTVKQLKEDYFKKIECFDSVEISGVEDRFNASLGT | |
| | YHDLLKIIKDKDFLDNEENEDILEDIVLTLTLFEDREMIEE | |
| | RLKTYAHLFDDKVMKQLKRRRYTGWGRLSRKLINGIRD | |
| | KQSGKTILDFLKSDGFANRNFMQLIHDDSLTFKEDIQKAQ | |
| | VSGQGDSLHEHIANLAGSPAIKKGILQTVKVVDELVKVM | |
| | GRHKPENIVIEMARENQTTQKGQKNSRERMKRIEEGIKE | |
| | LGSQILKEHPVENTQLQNEKLYLYYLQNGRDMYVDQEL | |
| | DINRLSDYDVDHIVPQSFLKDDSIDNKVLTRSDKNRGKS | |
| | DNVPSEEVVKKMKNYWRQLLNAKLITQRKFDNLTKAER | |
| | GGLSELDKAGFIKRQLVETRQITKHVAQILDSRMNTKYD | |
| | ENDKLIREVKVITLKSKLVSDFRKDFQFYKVREINNYHH | |
| | AHDAYLNAVVGTALIKKYPKLESEFVYGDYKVYDVRK | |
| | MIAKSEQEIGKATAKYFFYSNIMNFFKTEITLANGEIRKRP | |
| | LIETNGETGEIVWDKGRDFATVRKVLSMPQVNIVKKTEV | |
| | QTGGFSKESILPKRNSDKLIARKKDWDPKKYGGFDSPTV | |
| | AYSVLVVAKVEKGKSKKLKSVKELLGITIMERSSFEKNPI | |
| | DFLEAKGYKEVKKDLIIKLPKYSLFELENGRKRMLASAG | |
| | ELQKGNELALPSKYVNFLYLASHYEKLKGSPEDNEQKQL | |
| | FVEQHKHYLDEIIEQISEFSKRVILADANLDKVLSAYNKH | |
| | RDKPIREQAENIIHLFTLTNLGAPAAFKYFDTTIDRKRYTS | |
| | TKEVLDATLIHQSITGLYETRIDLSQLGGDGSPKKKRKVS | |
| | SDYKDHDGDYKDHDIDYKDDDDKAAG | |
| SpCas9 | ATGGATAAGAAATACTCAATAGGCTTAGATATCGGCA | SEQ ID NO: |
| Streptococcus | CAAATAGCGTCGGATGGGCGGTGATCACTGATGAATA | 43 |
| pyogenes | TAAGGTTCCGTCTAAAAAGTTCAAGGTTCTGGGAAAT | |
| M1GAS | ACAGACCGCCACAGTATCAAAAAAAATCTTATAGGGG | |
| wild type | CTCTTTTATTTGACAGTGGAGAGACAGCGGAAGCGAC | |
| NC_002737.2 | TCGTCTCAAACGGACAGCTCGTAGAAGGTATACACGT | |
| | CGGAAGAATCGTATTTGTTATCTACAGGAGATTTTTTC | |
| | AAATGAGATGGCGAAAGTAGATGATAGTTTCTTTCATC | |
| | GACTTGAAGAGTCTTTTTTGGTGGAAGAAGACAAGAA | |
| | GCATGAACGTCATCCTATTTTTGGAAATATAGTAGATG | |
| | AAGTTGCTTATCATGAGAAATATCCAACTATCTATCAT | |
| | CTGCGAAAAAAATTGGTAGATTCTACTGATAAAGCGG | |
| | ATTTGCGCTTAATCTATTTGGCCTTAGCGCATATGATT | |
| | AAGTTTCGTGGTCATTTTTTGATTGAGGGAGATTTAAA | |
| | TCCTGATAATAGTGATGTGGACAAACTATTTATCCAGT | |
| | TGGTACAAACCTACAATCAATTATTTGAAGAAAACCCT | |
| | ATTAACGCAAGTGGAGTAGATGCTAAAGCGATTCTTTC | |
| | TGCACGATTGAGTAAATCAAGACGATTAGAAAATCTC | |
| | ATTGCTCAGCTCCCCGGTGAGAAGAAAAATGGCTTATT | |
| | TGGGAATCTCATTGCTTTGTCATTGGGTTTGACCCCTA | |
| | ATTTTAAATCAAATTTTGATTTGGCAGAAGATGCTAAA | |
| | TTACAGCTTTCAAAAGATACTTACGATGATGATTTAGA | |
| | TAATTTATTGGCGCAAATTGGAGATCAATATGCTGATT | |
| | TGTTTTTGGCAGCTAAGAATTTATCAGATGCTATTTTA | |
| | CTTTCAGATATCCTAAGAGTAAATACTGAAATAACTAA | |
| | GGCTCCCCTATCAGCTTCAATGATTAAACGCTACGATG | |
| | AACATCATCAAGACTTGACTCTTTTAAAAGCTTTAGTT | |
| | CGACAACAACTTCCAGAAAAGTATAAAGAAATCTTTT | |
| | TTGATCAATCAAAAAACGGATATGCAGGTTATATTGAT | |
| | GGGGGAGCTAGCCAAGAAGAATTTTATAAATTTATCA | |
| | AACCAATTTTAGAAAAAATGGATGGTACTGAGGAATT | |
| | ATTGGTGAAACTAAATCGTGAAGATTTGCTGCGCAAG | |
| | CAACGGACCTTTGACAACGGCTCTATTCCCCATCAAAT | |
| | TCACTTGGGTGAGCTGCATGCTATTTTGAGAAGACAAG | |
| | AAGACTTTTATCCATTTTTAAAAGACAATCGTGAGAAG | |
| | ATTGAAAAAATCTTGACTTTTCGAATTCCTTATTATGTT | |
| | GGTCCATTGGCGCGTGGCAATAGTCGTTTTGCATGGAT | |
| | GACTCGGAAGTCTGAAGAAACAATTACCCCATGGAAT | |
| | TTTGAAGAAGTTGTCGATAAAGGTGCTTCAGCTCAATC | |
| | ATTTATTGAACGCATGACAAACTTTGATAAAAATCTTC | |
| | CAAATGAAAAAGTACTACCAAAACATAGTTTGCTTTAT | |
| | GAGTATTTTACGGTTTATAACGAATTGACAAAGGTCAA | |
| | ATATGTTACTGAAGGAATGCGAAAACCAGCATTTCTTT | |
| | CAGGTGAACAGAAGAAAGCCATTGTTGATTTACTCTTC | |
| | AAAACAAATCGAAAAGTAACCGTTAAGCAATTAAAAG | |
| | AAGATTATTTCAAAAAAATAGAATGTTTTGATAGTGTT | |
| | GAAATTTCAGGAGTTGAAGATAGATTTAATGCTTCATT | |
| | AGGTACCTACCATGATTTGCTAAAAATTATTAAAGATA | |
| | AAGATTTTTTGGATAATGAAGAAAATGAAGATATCTT | |
| | AGAGGATATTGTTTTAACATTGACCTTATTTGAAGATA | |
| | GGGAGATGATTGAGGAAAGACTTAAAACATATGCTCA | |
| | CCTCTTTGATGATAAGGTGATGAAACAGCTTAAACGTC | |
| | GCCGTTATACTGGTTGGGGACGTTTGTCTCGAAAATTG | |
| | ATTAATGGTATTAGGGATAAGCAATCTGGCAAAACAA | |
| | TATTAGATTTTTTGAAATCAGATGGTTTTGCCAATCGC | |
| | AATTTTATGCAGCTGATCCATGATGATAGTTTGACATT | |
| | TAAAGAAGACATTCAAAAAGCACAAGTGTCTGGACAA | |
| | GGCGATAGTTTACATGAACATATTGCAAATTTAGCTGG | |
| | TAGCCCTGCTATTAAAAAAGGTATTTTACAGACTGTAA | |
| | AAGTTGTTGATGAATTGGTCAAAGTAATGGGGCGGCA | |
| | TAAGCCAGAAAATATCGTTATTGAAATGGCACGTGAA | |
| | AATCAGACAACTCAAAAGGGCCAGAAAAATTCGCGAG | |
| | AGCGTATGAAACGAATCGAAGAAGGTATCAAAGAATT | |
| | AGGAAGTCAGATTCTTAAAGAGCATCCTGTTGAAAAT | |
| | ACTCAATTGCAAAATGAAAAGCTCTATCTCTATTATCT | |
| | CCAAAATGGAAGAGACATGTATGTGGACCAAGAATTA | |
| | GATATTAATCGTTTAAGTGATTATGATGTCGATCACAT | |
| | TGTTCCACAAAGTTTCCTTAAAGACGATTCAATAGACA | |
| | ATAAGGTCTTAACGCGTTCTGATAAAAATCGTGGTAA | |
| | ATCGGATAACGTTCCAAGTGAAGAAGTAGTCAAAAAG | |
| | ATGAAAAACTATTGGAGACAACTTCTAAACGCCAAGT | |
| | TAATCACTCAACGTAAGTTTGATAATTTAACGAAAGCT | |
| | GAACGTGGAGGTTTGAGTGAACTTGATAAAGCTGGTT | |
| | TTATCAAACGCCAATTGGTTGAAACTCGCCAAATCACT | |
| | AAGCATGTGGCACAAATTTTGGATAGTCGCATGAATA | |
| | CTAAATACGATGAAAATGATAAACTTATTCGAGAGGT | |
| | TAAAGTGATTACCTTAAAATCTAAATTAGTTTCTGACT | |
| | TCCGAAAAGATTTCCAATTCTATAAAGTACGTGAGATT | |
| | AACAATTACCATCATGCCCATGATGCGTATCTAAATGC | |
| | CGTCGTTGGAACTGCTTTGATTAAGAAATATCCAAAAC | |
| | TTGAATCGGAGTTTGTCTATGGTGATTATAAAGTTTAT | |
| | GATGTTCGTAAAATGATTGCTAAGTCTGAGCAAGAAA | |
| | TAGGCAAAGCAACCGCAAAATATTTCTTTTACTCTAAT | |
| | ATCATGAACTTCTTCAAAACAGAAATTACACTTGCAAA | |
| | TGGAGAGATTCGCAAACGCCCTCTAATCGAAACTAAT | |
| | GGGGAAACTGGAGAAATTGTCTGGGATAAAGGGCGAG | |
| | ATTTTGCCACAGTGCGCAAAGTATTGTCCATGCCCCAA | |
| | GTCAATATTGTCAAGAAAACAGAAGTACAGACAGGCG | |
| | GATTCTCCAAGGAGTCAATTTTACCAAAAAGAAATTC | |
| | GGACAAGCTTATTGCTCGTAAAAAAGACTGGGATCCA | |
| | AAAAAATATGGTGGTTTTGATAGTCCAACGGTAGCTTA | |
| | TTCAGTCCTAGTGGTTGCTAAGGTGGAAAAAGGGAAA | |
| | TCGAAGAAGTTAAAATCCGTTAAAGAGTTACTAGGGA | |
| | TCACAATTATGGAAAGAAGTTCCTTTGAAAAAAATCC | |
| | GATTGACTTTTTAGAAGCTAAAGGATATAAGGAAGTT | |
| | AAAAAAGACTTAATCATTAAACTACCTAAATATAGTCT | |
| | TTTTGAGTTAGAAAACGGTCGTAAACGGATGCTGGCT | |
| | AGTGCCGGAGAATTACAAAAAGGAAATGAGCTGGCTC | |
| | TGCCAAGCAAATATGTGAATTTTTTATATTTAGCTAGT | |
| | CATTATGAAAAGTTGAAGGGTAGTCCAGAAGATAACG | |
| | AACAAAAACAATTGTTTGTGGAGCAGCATAAGCATTA | |
| | TTTAGATGAGATTATTGAGCAAATCAGTGAATTTTCTA | |
| | AGCGTGTTATTTTAGCAGATGCCAATTTAGATAAAGTT | |
| | CTTAGTGCATATAACAAACATAGAGACAAACCAATAC | |
| | GTGAACAAGCAGAAAATATTATTCATTTATTTACGTTG | |
| | ACGAATCTTGGAGCTCCCGCTGCTTTTAAATATTTTGA | |
| | TACAACAATTGATCGTAAACGATATACGTCTACAAAA | |
| | GAAGTTTTAGATGCCACTCTTATCCATCAATCCATCAC | |
| | TGGTCTTTATGAAACACGCATTGATTTGAGTCAGCTAG | |
| | GAGGTGACTGA | |
| SpCas9 | MDKKYSIGLDIGTNSVGWAVITDEYKVPSKKFKVLGNTD | SEQ ID NO: |
| Streptococcus | RHSIKKNLIGALLFDSGETAEATRLKRTARRRYTRRKNRI | 37 |
| pyogenes | CYLQEIFSNEMAKVDDSFFHRLEESFLVEEDKKHERHPIF | |
| M1GAS | GNIVDEVAYHEKYPTIYHLRKKLVDSTDKADLRLIYLAL | |
| wild type | AHMIKFRGHFLIEGDLNPDNSDVDKLFIQLVQTYNQLFEE | |
| Encoded | NPINASGVDAKAILSARLSKSRRLENLIAQLPGEKKNGLF | |
| product of | GNLIALSLGLTPNFKSNFDLAEDAKLQLSKDTYDDDLDN | |
| NC_002737.2 | LLAQIGDQYADLFLAAKNLSDAILLSDILRVNTEITKAPL | |
| (100% | SASMIKRYDEHHQDLTLLKALVRQQLPEKYKEIFFDQSKN | |
| identical to | GYAGYIDGGASQEEFYKFIKPILEKMDGTEELLVKLNRE | |
| the canonical | DLLRKQRTFDNGSIPHQIHLGELHAILRRQEDFYPFLKDN | |
| Q99ZW2 | REKIEKILTFRIPYYVGPLARGNSRFAWMTRKSEETITPW | |
| wild type) | NFEEVVDKGASAQSFIERMTNFDKNLPNEKVLPKHSLLY | |
| | EYFTVYNELTKVKYVTEGMRKPAFLSGEQKKAIVDLLFK | |
| | TNRKVTVKQLKEDYFKKIECFDSVEISGVEDRFNASLGT | |
| | YHDLLKIIKDKDFLDNEENEDILEDIVLTLTLFEDREMIEE | |
| | RLKTYAHLFDDKVMKQLKRRRYTGWGRLSRKLINGIRD | |
| | KQSGKTILDFLKSDGFANRNFMQLIHDDSLTFKEDIQKAQ | |
| | VSGQGDSLHEHIANLAGSPAIKKGILQTVKVVDELVKVM | |
| | GRHKPENIVIEMARENQTTQKGQKNSRERMKRIEEGIKE | |
| | LGSQILKEHPVENTQLQNEKLYLYYLQNGRDMYVDQEL | |
| | DINRLSDYDVDHIVPQSFLKDDSIDNKVLTRSDKNRGKS | |
| | DNVPSEEVVKKMKNYWRQLLNAKLITQRKFDNLTKAER | |
| | GGLSELDKAGFIKRQLVETRQITKHVAQILDSRMNTKYD | |
| | ENDKLIREVKVITLKSKLVSDFRKDFQFYKVREINNYHH | |
| | AHDAYLNAVVGTALIKKYPKLESEFVYGDYKVYDVRK | |
| | MIAKSEQEIGKATAKYFFYSNIMNFFKTEITLANGEIRKRP | |
| | LIETNGETGEIVWDKGRDFATVRKVLSMPQVNIVKKTEV | |
| | QTGGFSKESILPKRNSDKLIARKKDWDPKKYGGFDSPTV | |
| | AYSVLVVAKVEKGKSKKLKSVKELLGITIMERSSFEKNPI | |
| | DFLEAKGYKEVKKDLIIKLPKYSLFELENGRKRMLASAG | |
| | ELQKGNELALPSKYVNFLYLASHYEKLKGSPEDNEQKQL | |
| | FVEQHKHYLDEIIEQISEFSKRVILADANLDKVLSAYNKH | |
| | RDKPIREQAENIIHLFTLTNLGAPAAFKYFDTTIDRKRYTS | |
| | TKEVLDATLIHQSITGLYETRIDLSQLGGD | |

[0375] The prime editors described herein may include any of the above SpCas9 sequences, or any variant thereof having at least 80%, at least 85%, at least 90%, at least 95%, or at least 99% sequence identity thereto.

### B. Wild Type Cas9 Orthologs

[0376] In other embodiments, the Cas9 protein can be a wild type Cas9 ortholog from another bacterial species different from the canonical Cas9 from S. pyogenes. For example, the following Cas9 orthologs can be used in connection with the prime editor constructs described in this specification. In addition, any variant Cas9 orthologs having at least 80%, at least 85%, at least 90%, at least 95%, or at least 99% sequence identity to any of the below orthologs may also be used with the present prime editors.

| Description | Sequence | SEQ ID NO: |
|---|---|---|
| LfCas9 | MKEYHIGLDIGTSSIGWAVTDSQFKLMRIKGKTAIGVRLFEEGK | SEQ ID NO: 44 |
| Lactobacillus | TAAERRTFRTTRRRLKRRKWRLHYLDEIFAPHLQEVDENFLRR | |
| fermentum | LKQSNIHPEDPTKNQAFIGKLLFPDLLKKNERGYPTLIKMRDEL | |
| wild type | PVEQRAHYPVMNIYKLREAMINEDRQFDLREVYLAVHHIVKY | |
| GenBank: | RGHFLNNASVDKFKVGRIDFDKSFNVLNEAYEELQNGEGSFTI | |
| SNX31424.11 | EPSKVEKIGQLLLDTKMRKLDRQKAVAKLLEVKVADKEETKR | |
| | NKQIATAMSKLVLGYKADFATVAMANGNEWKIDLSSETSEDEI | |
| | EKFREELSDAQNDILTEITSLFSQIMLNEIVPNGMSISESMMDRY | |
| | WTHERQLAEVKEYLATQPASARKEFDQVYNKYIGQAPKERGF | |
| | DLEKGLKKILSKKENWKEIDELLKAGDFLPKQRTSANGVIPHQ | |
| | MHQQELDRIIEKQAKYYPWLATENPATGERDRHQAKYELDQL | |
| | VSFRIPYYVGPLVTPEVQKATSGAKFAWAKRKEDGEITPWNL | |
| | WDKIDRAESAEAFIKRMTVKDTYLLNEDVLPANSLLYQKYNV | |
| | LNELNNVRVNGRRLSVGIKQDIYTELFKKKKTVKASDVASLV | |
| | MAKTRGVNKPSVEGLSDPKKFNSNLATYLDLKSIVGDKVDDN | |
| | RYQTDLENIIEWRSVFEDGEIFADKLTEVEWLTDEQRSALVKK | |
| | RYKGWGRLSKKLLTGIVDENGQRIIDLMWNTDQNFKEIVDQP | |
| | VFKEQIDQLNQKAITNDGMTLRERVESVLDDAYTSPQNKKAIW | |
| | QVVRVVEDIVKAVGNAPKSISIEFARNEGNKGEITRSRRTQLQK | |
| | LFEDQAHELVKDTSLTEELEKAPDLSDRYYFYFTQGGKDMYT | |
| | GDPINFDEISTKYDIDHILPQSFVKDNSLDNRVLTSRKENNKKS | |
| | DQVPAKLYAAKMKPYWNQLLKQGLITQRKFENLTKDVDQNIK | |
| | YRSLGFVKRQLVETRQVIKLTANILGSMYQEAGTEIIETRAGLT | |
| | KQLREEFDLPKVREVNDYHHAVDAYLTTFAGQYLNRRYPKLR | |
| | SFFVYGEYMKFKHGSDLKLRNFNFFHELMEGDKSQGKVVDQQ | |
| | TGELITTRDEVAKSFDRLLNMKYMLVSKEVHDRSDQLYGATIV | |
| | TAKESGKLTSPIEIKKNRLVDLYGAYTNGTSAFMTIIKFTGNKP | |
| | KYKVIGIPTTSAASLKRAGKPGSESYNQELHRIIKSNPKVKKGF | |
| | EIVVPHVSYGQLIVDGDCKFTLASPTVQHPATQLVLSKKSLETI | |
| | SSGYKILKDKPAIANERLIRVFDEVVGQMNRYFTIFDQRSNRQK | |
| | VADARDKFLSLPTESKYEGAKKVQVGKTEVITNLLMGLHANA | |
| | TQGDLKVLGLATFGFFQSTTGLSLSEDTMIVYQSPTGLFERRIC | |
| | LKDI | |
| SaCas9 | MDKKYSIGLDIGTNSVGWAVITDEYKVPSKKFKVLGNTDRHSI | SEQ ID NO: 37 |
| Staphylococcus | KKNLIGALLFDSGETAEATRLKRTARRRYTRRKNRICYLQEIFS | |
| aureus | NEMAKVDDSFFHRLEESFLVEEDKKHERHPIFGNIVDEVAYHE | |
| wild type | KYPTIYHLRKKLVDSTDKADLRLIYLALAHMIKFRGHFLIEGDL | |
| GenBank: | NPDNSDVDKLFIQLVQTYNQLFEENPINASGVDAKAILSARLSK | |
| AYD60528.1 | SRRLENLIAQLPGEKKNGLFGNLIALSLGLTPNFKSNFDLAEDA | |
| | KLQLSKDTYDDDLDNLLAQIGDQYADLFLAAKNLSDAILLSDI | |
| | LRVNTEITKAPLSASMIKRYDEHHQDLTLLKALVRQQLPEKYK | |
| | EIFFDQSKNGYAGYIDGGASQEEFYKFIKPILEKMDGTEELLVK | |
| | LNREDLLRKQRTFDNGSIPHQIHLGELHAILRRQEDFYPFLKDN | |
| | REKIEKILTFRIPYYVGPLARGNSRFAWMTRKSEETITPWNFEE | |
| | VVDKGASAQSFIERMTNFDKNLPNEKVLPKHSLLYEYFTVYNE | |
| | LTKVKYVTEGMRKPAFLSGEQKKAIVDLLFKTNRKVTVKQLK | |
| | EDYFKKIECFDSVEISGVEDRFNASLGTYHDLLKIIKDKDFLDN | |
| | EENEDILEDIVLTLTLFEDREMIEERLKTYAHLFDDKVMKQLKR | |
| | RRYTGWGRLSRKLINGIRDKQSGKTILDFLKSDGFANRNFMQLI | |
| | HDDSLTFKEDIQKAQVSGQGDSLHEHIANLAGSPAIKKGILQTV | |
| | KVVDELVKVMGRHKPENIVIEMARENQTTQKGQKNSRERMK | |
| | RIEEGIKELGSQILKEHPVENTQLQNEKLYLYYLQNGRDMYVD | |
| | QELDINRLSDYDVDHIVPQSFLKDDSIDNKVLTRSDKNRGKSD | |
| | NVPSEEVVKKMKNYWRQLLNAKLITQRKFDNLTKAERGGLSE | |
| | LDKAGFIKRQLVETRQITKHVAQILDSRMNTKYDENDKLIREV | |
| | KVITLKSKLVSDFRKDFQFYKVREINNYHHAHDAYLNAVVGT | |
| | ALIKKYPKLESEFVYGDYKVYDVRKMIAKSEQEIGKATAKYFF | |
| | YSNIMNFFKTEITLANGEIRKRPLIETNGETGEIVWDKGRDFAT | |
| | VRKVLSMPQVNIVKKTEVQTGGFSKESILPKRNSDKLIARKKD | |
| | WDPKKYGGFDSPTVAYSVLVVAKVEKGKSKKLKSVKELLGITI | |
| | MERSSFEKNPIDFLEAKGYKEVKKDLIIKLPKYSLFELENGRKR | |
| | MLASAGELQKGNELALPSKYVNFLYLASHYEKLKGSPEDNEQ | |
| | KQLFVEQHKHYLDEIIEQISEFSKRVILADANLDKVLSAYNKHR | |
| | DKPIREQAENIIHLFTLTNLGAPAAFKYFDTTIDRKRYTSTKEVL | |
| | DATLIHQSITGLYETRIDLSQLGGD | |
| SaCas9 | MGKRNYILGLDIGITSVGYGIIDYETRDVIDAGVRLFKEANVEN | SEQ ID NO: 45 |
| Staphylococcus | NEGRRSKRGARRLKRRRRHRIQRVKKLLFDYNLLTDHSELSGI | |
| aureus | NPYEARVKGLSQKLSEEEFSAALLHLAKRRGVHNVNEVEEDT | |
| | GNELSTKEQISRNSKALEEKYVAELQLERLKKDGEVRGSINRFK | |
| | TSDYVKEAKQLLKVQKAYHQLDQSFIDTYIDLLETRRTYYEGP | |
| | GEGSPFGWKDIKEWYEMLMGHCTYFPEELRSVKYAYNADLY | |
| | NALNDLNNLVITRDENEKLEYYEKFQIIENVFKQKKKPTLKQIA | |
| | KEILVNEEDIKGYRVTSTGKPEFTNLKVYHDIKDITARKEIIENA | |
| | ELLDQIAKILTIYQSSEDIQEELTNLNSELTQEEIEQISNLKGYTG | |
| | THNLSLKAINLILDELWHTNDNQIAIFNRLKLVPKKVDLSQQKE | |
| | IPTTLVDDFILSPVVKRSFIQSIKVINAIIKKYGLPNDIIIELAREKN | |
| | SKDAQKMINEMQKRNRQTNERIEEIIRTTGKENAKYLIEKIKLH | |
| | DMQEGKCLYSLEAIPLEDLLNNPFNYEVDHIIPRSVSFDNSFNN | |
| | KVLVKQEENSKKGNRTPFQYLSSSDSKISYETFKKHILNLAKGK | |
| | GRISKTKKEYLLEERDINRFSVQKDFINRNLVDTRYATRGLMN | |
| | LLRSYFRVNNLDVKVKSINGGFTSFLRRKWKFKKERNKGYKH | |
| | HAEDALIIANADFIFKEWKKLDKAKKVMENQMFEEKQAESMP | |
| | EIETEQEYKEIFITPHQIKHIKDFKDYKYSHRVDKKPNRKLINDT | |
| | LYSTRKDDKGNTLIVNNLNGLYDKDNDKLKKLINKSPEKLLM | |
| | YHHDPQTYQKLKLIMEQYGDEKNPLYKYYEETGNYLTKYSKK | |
| | DNGPVIKKIKYYGNKLNAHLDITDDYPNSRNKVVKLSLKPYRF | |
| | DVYLDNGVYKFVTVKNLDVIKKENYYEVNSKCYEEAKKLKKI | |
| | SNQAEFIASFYKNDLIKINGELYRVIGVNNDLLNRIEVNMIDITY | |
| | REYLENMNDKRPPHIIKTIASKTQSIKKYSTDILGNLYEVKSKK | |
| | HPQIIKK | |
| StCas9 | MLFNKCIIISINLDFSNKEKCMTKPYSIGLDIGTNSVGWAVITDN | SEQ ID NO: 46 |
| Streptococcus | YKVPSKKMKVLGNTSKKYIKKNLLGVLLFDSGITAEGRRLKRT | |
| thermophilus | ARRRYTRRRNRILYLQEIFSTEMATLDDAFFQRLDDSFLVPDDK | |
| UniProtKB/ | RDSKYPIFGNLVEEKVYHDEFPTIYHLRKYLADSTKKADLRLV | |
| Swiss-Prot: | YLALAHMIKYRGHFLIEGEFNSKNNDIQKNFQDFLDTYNAIFES | |
| G3ECR1.2 | DLSLENSKQLEEIVKDKISKLEKKDRILKLFPGEKNSGIFSEFLK | |
| Wild type | LIVGNQADFRKCFNLDEKASLHFSKESYDEDLETLLGYIGDDYS | |
| | DVFLKAKKLYDAILLSGFLTVTDNETEAPLSSAMIKRYNEHKE | |
| | DLALLKEYIRNISLKTYNEVFKDDTKNGYAGYIDGKTNQEDFY | |
| | VYLKNLLAEFEGADYFLEKIDREDFLRKQRTFDNGSIPYQIHLQ | |
| | EMRAILDKQAKFYPFLAKNKERIEKILTFRIPYYVGPLARGNSD | |
| | FAWSIRKRNEKITPWNFEDVIDKESSAEAFINRMTSFDLYLPEE | |
| | KVLPKHSLLYETFNVYNELTKVRFIAESMRDYQFLDSKQKKDI | |
| | VRLYFKDKRKVTDKDIIEYLHAIYGYDGIELKGIEKQFNSSLST | |
| | YHDLLNIINDKEFLDDSSNEAIIEEIIHTLTIFEDREMIKQRLSKFE | |
| | NIFDKSVLKKLSRRHYTGWGKLSAKLINGIRDEKSGNTILDYLI | |
| | DDGISNRNFMQLIHDDALSFKKKIQKAQIIGDEDKGNIKEVVKS | |
| | LPGSPAIKKGILQSIKIVDELVKVMGGRKPESIVVEMARENQYT | |
| | NQGKSNSQQRLKRLEKSLKELGSKILKENIPAKLSKIDNNALQN | |
| | DRLYLYYLQNGKDMYTGDDLDIDRLSNYDIDHIIPQAFLKDNSI | |
| | DNKVLVSSASNRGKSDDFPSLEVVKKRKTFWYQLLKSKLISQR | |
| | KFDNLTKAERGGLLPEDKAGFIQRQLVETRQITKHVARLLDEK | |
| | FNNKKDENNRAVRTVKIITLKSTLVSQFRKDFELYKVREINDFH | |
| | HAHDAYLNAVIASALLKKYPKLEPEFVYGDYPKYNSFRERKSA | |
| | TEKVYFYSNIMNIFKKSISLADGRVIERPLIEVNEETGESVWNKE | |
| | SDLATVRRVLSYPQVNVVKKVEEQNHGLDRGKPKGLFNANLS | |
| | SKPKPNSNENLVGAKEYLDPKKYGGYAGISNSFAVLVKGTIEK | |
| | GAKKKITNVLEFQGISILDRINYRKDKLNFLLEKGYKDIELIIELP | |
| | KYSLFELSDGSRRMLASILSTNNKRGEIHKGNQIFLSQKFVKLL | |
| | YHAKRISNTINENHRKYVENHKKEFEELFYYILEFNENYVGAK | |
| | KNGKLLNSAFQSWQNHSIDELCSSFIGPTGSERKGLFELTSRGS | |
| | AADFEFLGVKIPRYRDYTPSSLLKDATLIHQSVTGLYETRIDLA | |
| | KLGEG | |
| LcCas9 | MKIKNYNLALTPSTSAVGHVEVDDDLNILEPVHHQKAIGVAKF | SEQ ID NO: 47 |
| Lactobacillus | GEGETAEARRLARSARRTTKRRANRINHYFNEIMKPEIDKVDP | |
| crispatus | LMFDRIKQAGLSPLDERKEFRTVIFDRPNIASYYHNQFPTIWHL | |
| NCBI | QKYLMITDEKADIRLIYWALHSLLKHRGHFFNTTPMSQFKPGK | |
| Reference | LNLKDDMLALDDYNDLEGLSFAVANSPEIEKVIKDRSMHKKE | |
| Sequence: | KIAELKKLIVNDVPDKDLAKRNNKIITQIVNAIMGNSFHLNFIFD | |
| WP_133478044.1 | MDLDKLTSKAWSFKLDDPELDTKFDAISGSMTDNQIGIFETLQ | |
| Wild type | KIYSAISLLDILNGSSNVVDAKNALYDKHKRDLNLYFKFLNTLP | |
| | DEIAKTLKAGYTLYIGNRKKDLLAARKLLKVNVAKNFSQDDF | |
| | YKLINKELKSIDKQGLQTRFSEKVGELVAQNNFLPVQRSSDNV | |
| | FIPYQLNAITFNKILENQGKYYDFLVKPNPAKKDRKNAPYELSQ | |
| | LMQFTIPYYVGPLVTPEEQVKSGIPKTSRFAWMVRKDNGAITP | |
| | WNFYDKVDIEATADKFIKRSIAKDSYLLSELVLPKHSLLYEKYE | |
| | VFNELSNVSLDGKKLSGGVKQILFNEVFKKTNKVNTSRILKAL | |
| | AKHNIPGSKITGLSNPEEFTSSLQTYNAWKKYFPNQIDNFAYQQ | |
| | DLEKMIEWSTVFEDHKILAKKLDEIEWLDDDQKKFVANTRLR | |
| | GWGRLSKRLLTGLKDNYGKSIMQRLETTKANFQQIVYKPEFRE | |
| | QIDKISQAAAKNQSLEDILANSYTSPSNRKAIRKTMSVVDEYIK | |
| | LNHGKEPDKIFLMFQRSEQEKGKQTEARSKQLNRILSQLKADK | |
| | SANKLFSKQLADEFSNAIKKSKYKLNDKQYFYFQQLGRDALTG | |
| | EVIDYDELYKYTVLHIIPRSKLTDDSQNNKVLTKYKIVDGSVAL | |
| | KFGNSYSDALGMPIKAFWTELNRLKLIPKGKLLNLTTDFSTLN | |
| | KYQRDGYIARQLVETQQIVKLLATIMQSRFKHTKIIEVRNSQVA | |
| | NIRYQFDYFRIKNLNEYYRGFDAYLAAVVGTYLYKVYPKARR | |
| | LFVYGQYLKPKKTNQENQDMHLDSEKKSQGFNFLWNLLYGK | |
| | QDQIFVNGTDVIAFNRKDLITKMNTVYNYKSQKISLAIDYHNG | |
| | AMFKATLFPRNDRDTAKTRKLIPKKKDYDTDIYGGYTSNVDG | |
| | YMLLAEIIKRDGNKQYGFYGVPSRLVSELDTLKKTRYTEYEEK | |
| | LKEIIKPELGVDLKKIKKIKILKNKVPFNQVIIDKGSKFFITSTSY | |
| | RWNYRQLILSAESQQTLMDLVVDPDFSNHKARKDARKNADER | |
| | LIKVYEEILYQVKNYMPMFVELHRCYEKLVDAQKTFKSLKISD | |
| | KAMVLNQILILLHSNATSPVLEKLGYHTRFTLGKKHNLISENAV | |
| | LVTQSITGLKENHVSIKQML | |
| PdCas9 | MTNEKYSIGLDIGTSSIGFAVVNDNNRVIRVKGKNAIGVRLFDE | SEQ ID NO: 48 |
| Pedicoccus | GKAAADRRSFRTTRRSFRTTRRRLSRRRWRLKLLREIFDAYITP | |
| damnosus | VDEAFFIRLKESNLSPKDSKKQYSGDILFNDRSDKDFYEKYPTI | |
| NCBI | YHLRNALMTEHRKFDVREIYLAIHHIMKFRGHFLNATPANNFK | |
| Reference | VGRLNLEEKFEELNDIYQRVFPDESIEFRTDNLEQIKEVLLDNK | |
| Sequence: | RSRADRQRTLVSDIYQSSEDKDIEKRNKAVATEILKASLGNKA | |
| WP_062913273.1 | KLNVITNVEVDKEAAKEWSITFDSESIDDDLAKIEGQMTDDGH | |
| Wild type | EIIEVLRSLYSGITLSAIVPENHTLSQSMVAKYDLHKDHLKLFK | |
| | KLINGMTDTKKAKNLRAAYDGYIDGVKGKVLPQEDFYKQVQ | |
| | VNLDDSAEANEIQTYIDQDIFMPKQRTKANGSIPHQLQQQELD | |
| | QIIENQKAYYPWLAELNPNPDKKRQQLAKYKLDELVTFRVPY | |
| | YVGPMITAKDQKNQSGAEFAWMIRKEPGNITPWNFDQKVDR | |
| | MATANQFIKRMTTTDTYLLGEDVLPAQSLLYQKFEVLNELNKI | |
| | RIDHKPISIEQKQQIFNDLFKQFKNVTIKHLQDYLVSQGQYSKR | |
| | PLIEGLADEKRFNSSLSTYSDLCGIFGAKLVEENDRQEDLEKIIE | |
| | WSTIFEDKKIYRAKLNDLTWLTDDQKEKLATKRYQGWGRLSR | |
| | KLLVGLKNSEHRNIMDILWITNENFMQIQAEPDFAKLVTDANK | |
| | GMLEKTDSQDVINDLYTSPQNKKAIRQILLVVHDIQNAMHGQA | |
| | PAKIHVEFARGEERNPRRSVQRQRQVEAAYEKVSNELVSAKVR | |
| | QEFKEAINNKRDFKDRLFLYFMQGGIDIYTGKQLNIDQLSSYQI | |
| | DHILPQAFVKDDSLTNRVLTNENQVKADSVPIDIFGKKMLSVW | |
| | GRMKDQGLISKGKYRNLTMNPENISAHTENGFINRQLVETRQV | |
| | IKLAVNILADEYGDSTQIISVKADLSHQMREDFELLKNRDVND | |
| | YHHAFDAYLAAFIGNYLLKRYPKLESYFVYGDFKKFTQKETK | |
| | MRRFNFIYDLKHCDQVVNKETGEILWTKDEDIKYIRHLFAYKK | |
| | ILVSHEVREKRGALYNQTIYKAKDDKGSGQESKKLIRIKDDKE | |
| | TKIYGGYSGKSLAYMTIVQITKKNKVSYRVIGIPTLALARLNKL | |
| | ENDSTENNGELYKIIKPQFTHYKVDKKNGEIIETTDDFKIVVSK | |
| | VRFQQLIDDAGQFFMLASDTYKNNAQQLVISNNALKAINNTNI | |
| | TDCPRDDLERLDNLRLDSAFDEIVKKMDKYFSAYDANNFREKI | |
| | RNSNLIFYQLPVEDQWENNKITELGKRTVLTRILQGLHANATTT | |
| | DMSIFKIKTPFGQLRQRSGISLSENAQLIYQSPTGLFERRVQLNK | |
| | IK | |
| FnCas9 | MKKQKFSDYYLGFDIGTNSVGWCVTDLDYNVLRFNKKDMWG | SEQ ID NO: 49 |
| Fusobaterium | SRLFEEAKTAAERRVQRNSRRRLKRRKWRLNLLEEIFSNEILKI | |
| nucleatum | DSNFFRRLKESSLWLEDKSSKEKFTLFNDDNYKDYDFYKQYPT | |
| NCBI | IFHLRNELIKNPEKKDIRLVYLAIHSIFKSRGHFLFEGQNLKEIKN | |
| Reference | FETLYNNLIAFLEDNGINKIIDKNNIEKLEKIVCDSKKGLKDKEK | |
| Sequence: | EFKEIFNSDKQLVAIFKLSVGSSVSLNDLFDTDEYKKGEVEKEK | |
| WP_060798984.1 | ISFREQIYEDDKPIYYSILGEKIELLDIAKTFYDFMVLNNILADSQ | |
| | YISEAKVKLYEEHKKDLKNLKYIIRKYNKGNYDKLFKDKNEN | |
| | NYSAYIGLNKEKSKKEVIEKSRLKIDDLIKNIKGYLPKVEEIEEK | |
| | DKAIFNKILNKIELKTILPKQRISDNGTLPYQIHEAELEKILENQS | |
| | KYYDFLNYEENGIITKDKLLMTFKFRIPYYVGPLNSYHKDKGG | |
| | NSWIVRKEEGKILPWNFEQKVDIEKSAEEFIKRMTNKCTYLNG | |
| | EDVIPKDTFLYSEYVILNELNKVQVNDEFLNEENKRKIIDELFKE | |
| | NKKVSEKKFKEYLLVKQIVDGTIELKGVKDSFNSNYISYIRFKD | |
| | IFGEKLNLDIYKEISEKSILWKCLYGDDKKIFEKKIKNEYGDILT | |
| | KDEIKKINTFKFNNWGRLSEKLLTGIEFINLETGECYSSVMDAL | |
| | RRTNYNLMELLSSKFTLQESINNENKEMNEASYRDLIEESYVSP | |
| | SLKRAIFQTLKIYEEIRKITGRVPKKVFIEMARGGDESMKNKKIP | |
| | ARQEQLKKLYDSCGNDIANFSIDIKEMKNSLISYDNNSLRQKKL | |
| | YLYYLQFGKCMYTGREIDLDRLLQNNDTYDIDHIYPRSKVIKD | |
| | DSFDNLVLVLKNENAEKSNEYPVKKEIQEKMKSFWRFLKEKN | |
| | FISDEKYKRLTGKDDFELRGFMARQLVNVRQTTKEVGKILQQI | |
| | EPEIKIVYSKAEIASSFREMFDFIKVRELNDTHHAKDAYLNIVA | |
| | GNVYNTKFTEKPYRYLQEIKENYDVKKIYNYDIKNAWDKENS | |
| | LEIVKKNMEKNTVNITRFIKEKKGQLFDLNPIKKGETSNEIISIKP | |
| | KVYNGKDDKLNEKYGYYKSLNPAYFLYVEHKEKNKRIKSFER | |
| | VNLVDVNNIKDEKSLVKYLIENKKLVEPRVIKKVYKRQVILIND | |
| | YPYSIVTLDSNKLMDFENLKPLFLENKYEKILKNVIKFLEDNQG | |
| | KSEENYKFIYLKKKDRYEKNETLESVKDRYNLEFNEMYDKFLE | |
| | KLDSKDYKNYMNNKKYQELLDVKEKFIKLNLFDKAFTLKSFL | |
| | DLFNRKTMADFSKVGLTKYLGKIQKISSNVLSKNELYLLEESVT | |
| | GLFVKKIKL | |
| EcCas9 | RRKQRIQILQELLGEEVLKTDPGFFHRMKESRYVVEDKRTLDG | SEQ ID NO: 50 |
| Enterococcus | KQVELPYALFVDKDYTDKEYYKQFPTINHLIVYLMTTSDTPDIR | |
| cecorum | LVYLALHYYMKNRGNFLHSGDINNVKDINDILEQLDNVLETFL | |
| NCBI | DGWNLKLKSYVEDIKNIYNRDLGRGERKKAFVNTLGAKTKAE | |
| Reference | KAFCSLISGGSTNLAELFDDSSLKEIETPKIEFASSSLEDKIDGIQE | |
| Sequence: | ALEDRFAVIEAAKRLYDWKTLTDILGDSSSLAEARVNSYQMH | |
| WP_047338501.1 | HEQLLELKSLVKEYLDRKVFQEVFVSLNVANNYPAYIGHTKIN | |
| Wild type | GKKKELEVKRTKRNDFYSYVKKQVIEPIKKKVSDEAVLTKLSE | |
| | IESLIEVDKYLPLQVNSDNGVIPYQVKLNELTRIFDNLENRIPVL | |
| | RENRDKIIKTFKFRIPYYVGSLNGVVKNGKCTNWMVRKEEGKI | |
| | YPWNFEDKVDLEASAEQFIRRMTNKCTYLVNEDVLPKYSLLYS | |
| | KYLVLSELNNLRIDGRPLDVKIKQDIYENVFKKNRKVTLKKIK | |
| | KYLLKEGIITDDDELSGLADDVKSSLTAYRDFKEKLGHLDLSE | |
| | AQMENIILNITLFGDDKKLLKKRLAALYPFIDDKSLNRIATLNY | |
| | RDWGRLSERFLSGITSVDQETGELRTIIQCMYETQANLMQLLA | |
| | EPYHFVEAIEKENPKVDLESISYRIVNDLYVSPAVKRQIWQTLL | |
| | VIKDIKQVMKHDPERIFIEMAREKQESKKTKSRKQVLSEVYKK | |
| | AKEYEHLFEKLNSLTEEQLRSKKIYLYFTQLGKCMYSGEPIDFE | |
| | NLVSANSNYDIDHIYPQSKTIDDSFNNIVLVKKSLNAYKSNHYP | |
| | IDKNIRDNEKVKTLWNTLVSKGLITKEKYERLIRSTPFSDEELA | |
| | GFIARQLVETRQSTKAVAEILSNWFPESEIVYSKAKNVSNFRQD | |
| | FEILKVRELNDCHHAHDAYLNIVVGNAYHTKFTNSPYRFIKNK | |
| | ANQEYNLRKLLQKVNKIESNGVVAWVGQSENNPGTIATVKKV | |
| | IRRNTVLISRMVKEVDGQLFDLTLMKKGKGQVPIKSSDERLTDI | |
| | SKYGGYNKATGAYFTFVKSKKRGKVVRSFEYVPLHLSKQFEN | |
| | NNELLKEYIEKDRGLTDVEILIPKVLINSLFRYNGSLVRITGRGD | |
| | TRLLLVHEQPLYVSNSFVQQLKSVSSYKLKKSENDNAKLTKTA | |
| | TEKLSNIDELYDGLLRKLDLPIYSYWFSSIKEYLVESRTKYIKLSI | |
| | EEKALVIFEILHLFQSDAQVPNLKILGLSTKPSRIRIQKNLKDTD | |
| | KMSIIHQSPSGIFEHEIELTSL | |
| AhCas9 | MQNGFLGITVSSEQVGWAVTNPKYELERASRKDLWGVRLFDK | SEQ ID NO: 51 |
| Anaerostipes | AETAEDRRMFRTNRRLNQRKKNRIHYLRDIFHEEVNQKDPNFF | |
| hadrus | QQLDESNFCEDDRTVEFNFDTNLYKNQFPTVYHLRKYLMETK | |
| NCBI | DKPDIRLVYLAFSKFMKNRGHFLYKGNLGEVMDFENSMKGFC | |
| Reference | ESLEKFNIDFPTLSDEQVKEVRDILCDHKIAKTVKKKNIITITKV | |
| Sequence: | KSKTAKAWIGLFCGCSVPVKVLFQDIDEEIVTDPEKISFEDASY | |
| WP_044924278.1 | DDYIANIEKGVGIYYEAIVSAKMLFDWSILNEILGDHQLLSDAM | |
| Wild type | IAEYNKHHDDLKRLQKIIKGTGSRELYQDIFINDVSGNYVCYVG | |
| | HAKTMSSADQKQFYTFLKNRLKNVNGISSEDAEWIDTEIKNGT | |
| | LLPKQTKRDNSVIPHQLQLREFELILDNMQEMYPFLKENREKLL | |
| | KIFNFVIPYYVGPLKGVVRKGESTNWMVPKKDGVIHPWNFDE | |
| | MVDKEASAECFISRMTGNCSYLFNEKVLPKNSLLYETFEVLNE | |
| | LNPLKINGEPISVELKQRIYEQLFLTGKKVTKKSLTKYLIKNGY | |
| | DKDIELSGIDNEFHSNLKSHIDFEDYDNLSDEEVEQIILRITVFED | |
| | KQLLKDYLNREFVKLSEDERKQICSLSYKGWGNLSEMLLNGIT | |
| | VTDSNGVEVSVMDMLWNTNLNLMQILSKKYGYKAEIEHYNK | |
| | EHEKTIYNREDLMDYLNIPPAQRRKVNQLITIVKSLKKTYGVPN | |
| | KIFFKISREHQDDPKRTSSRKEQLKYLYKSLKSEDEKHLMKELD | |
| | ELNDHELSNDKVYLYFLQKGRCIYSGKKLNLSRLRKSNYQNDI | |
| | DYIYPLSAVNDRSMNNKVLTGIQENRADKYTYFPVDSEIQKKM | |
| | KGFWMELVLQGFMTKEKYFRLSRENDFSKSELVSFIEREISDNQ | |
| | QSGRMIASVLQYYFPESKIVFVKEKLISSFKRDFHLISSYGHNHL | |
| | QAAKDAYITIVVGNVYHTKFTMDPAIYFKNHKRKDYDLNRLF | |
| | LENISRDGQIAWESGPYGSIQTVRKEYAQNHIAVTKRVVEVKG | |
| | GLFKQMPLKKGHGEYPLKTNDPRFGNIAQYGGYTNVTGSYFV | |
| | LVESMEKGKKRISLEYVPVYLHERLEDDPGHKLLKEYLVDHR | |
| | KLNHPKILLAKVRKNSLLKIDGFYYRLNGRSGNALILTNAVELI | |
| | MDDWQTKTANKISGYMKRRAIDKKARVYQNEFHIQELEQLYD | |
| | FYLDKLKNGVYKNRKNNQAELIHNEKEQFMELKTEDQCVLLT | |
| | EIKKLFVCSPMQADLTLIGGSKHTGMIAMSSNVTKADFAVIAE | |
| | DPLGLRNKVIYSHKGEK | |
| KvCas9 | MSQNNNKIYNIGLDIGDASVGWAVVDEHYNLLKRHGKHMWG | SEQ ID NO: 52 |
| Kandleria | SRLFTQANTAVERRSSRSTRRRYNKRRERIRLLREIMEDMVLD | |
| vitulina | VDPTFFIRLANVSFLDQEDKKDYLKENYHSNYNLFIDKDFNDK | |
| NCBI | TYYDKYPTIYHLRKHLCESKEKEDPRLIYLALHHIVKYRGNFLY | |
| Reference | EGQKFSMDVSNIEDKMIDVLRQFNEINLFEYVEDRKKIDEVLN | |
| Sequence: | VLKEPLSKKHKAEKAFALFDTTKDNKAAYKELCAALAGNKFN | |
| WP_031589969.1 | VTKMLKEAELHDEDEKDISFKFSDATFDDAFVEKQPLLGDCVE | |
| Wild type | FIDLLHDIYSWVELQNILGSAHTSEPSISAAMIQRYEDHKNDLK | |
| | LLKDVIRKYLPKKYFEVFRDEKSKKNNYCNYINHPSKTPVDEF | |
| | YKYIKKLIEKIDDPDVKTILNKIELESFMLKQNSRTNGAVPYQM | |
| | QLDELNKILENQSVYYSDLKDNEDKIRSILTFRIPYYFGPLNITK | |
| | DRQFDWIIKKEGKENERILPWNANEIVDVDKTADEFIKRMRNF | |
| | CTYFPDEPVMAKNSLTVSKYEVLNEINKLRINDHLIKRDMKDK | |
| | MLHTLFMDHKSISANAMKKWLVKNQYFSNTDDIKIEGFQKEN | |
| | ACSTSLTPWIDFTKIFGKINESNYDFIEKIIYDVTVFEDKKILRRR | |
| | LKKEYDLDEEKIKKILKLKYSGWSRLSKKLLSGIKTKYKDSTRT | |
| | PETVLEVMERTNMNLMQVINDEKLGFKKTIDDANSTSVSGKFS | |
| | YAEVQELAGSPAIKRGIWQALLIVDEIKKIMKHEPAHVYIEFAR | |
| | NEDEKERKDSFVNQMLKLYKDYDFEDETEKEANKHLKGEDA | |
| | KSKIRSERLKLYYTQMGKCMYTGKSLDIDRLDTYQVDHIVPQS | |
| | LLKDDSIDNKVLVLSSENQRKLDDLVIPSSIRNKMYGFWEKLF | |
| | NNKIISPKKFYSLIKTEFNEKDQERFINRQIVETRQITKHVAQIID | |
| | NHYENTKVVTVRADLSHQFRERYHIYKNRDINDFHHAHDAYI | |
| | ATILGTYIGHRFESLDAKYIYGEYKRIFRNQKNKGKEMKKNND | |
| | GFILNSMRNIYADKDTGEIVWDPNYIDRIKKCFYYKDCFVTKK | |
| | LEENNGTFFNVTVLPNDTNSDKDNTLATVPVNKYRSNVNKYG | |
| | GFSGVNSFIVAIKGKKKKGKKVIEVNKLTGIPLMYKNADEEIKI | |
| | NYLKQAEDLEEVQIGKEILKNQLIEKDGGLYYIVAPTEIINAKQ | |
| | LILNESQTKLVCEIYKAMKYKNYDNLDSEKIIDLYRLLINKMEL | |
| | YYPEYRKQLVKKFEDRYEQLKVISIEEKCNIIKQILATLHCNSSI | |
| | GKIMYSDFKISTTIGRLNGRTISLDDISFIAESPTGMYSKKYKL | |
| EfCas9 | MRLFEEGHTAEDRRLKRTARRRISRRRNRLRYLQAFFEEAMTD | SEQ ID NO: 53 |
| Enterococcus | LDENFFARLQESFLVPEDKKWHRHPIFAKLEDEVAYHETYPTIY | |
| faecalis | HLRKKLADSSEQADLRLIYLALAHIVKYRGHFLIEGKLSTENTS | |
| NCBI | VKDQFQQFMVIYNQTFVNGESRLVSAPLPESVLIEEELTEKASR | |
| Reference | TKKSEKVLQQFPQEKANGLFGQFLKLMVGNKADFKKVFGLEE | |
| Sequence: | EAKITYASESYEEDLEGILAKVGDEYSDVFLAAKNVYDAVELS | |
| WP_016631044.1 | TILADSDKKSHAKLSSSMIVRFTEHQEDLKKFKRFIRENCPDEY | |
| Wild type | DNLFKNEQKDGYAGYIAHAGKVSQLKFYQYVKKIIQDIAGAE | |
| | YFLEKIAQENFLRKQRTFDNGVIPHQIHLAELQAIIHRQAAYYPF | |
| | LKENQEKIEQLVTFRIPYYVGPLSKGDASTFAWLKRQSEEPIRP | |
| | WNLQETVDLDQSATAFIERMTNFDTYLPSEKVLPKHSLLYEKF | |
| | MVFNELTKISYTDDRGIKANFSGKEKEKIFDYLFKTRRKVKKK | |
| | DIIQFYRNEYNTEIVTLSGLEEDQFNASFSTYQDLLKCGLTRAEL | |
| | DHPDNAEKLEDIIKILTIFEDRQRIRTQLSTFKGQFSAEVLKKLE | |
| | RKHYTGWGRLSKKLINGIYDKESGKTILDYLVKDDGVSKHYN | |
| | RNFMQLINDSQLSFKNAIQKAQSSEHEETLSETVNELAGSPAIK | |
| | KGIYQSLKIVDELVAIMGYAPKRIVVEMARENQTTSTGKRRSIQ | |
| | RLKIVEKAMAEIGSNLLKEQPTTNEQLRDTRLFLYYMQNGKD | |
| | MYTGDELSLHRLSHYDIDHIIPQSFMKDDSLDNLVLVGSTENR | |
| | GKSDDVPSKEVVKDMKAYWEKLYAAGLISQRKFQRLTKGEQ | |
| | GGLTLEDKAHFIQRQLVETRQITKNVAGILDQRYNAKSKEKKV | |
| | QIITLKASLTSQFRSIFGLYKVREVNDYHHGQDAYLNCVVATTL | |
| | LKVYPNLAPEFVYGEYPKFQTFKENKATAKAIIYTNLLRFFTED | |
| | EPRFTKDGEILWSNSYLKTIKKELNYHQMNIVKKVEVQKGGFS | |
| | KESIKPKGPSNKLIPVKNGLDPQKYGGFDSPVVAYTVLFTHEK | |
| | GKKPLIKQEILGITIMEKTRFEQNPILFLEEKGFLRPRVLMKLPK | |
| | YTLYEFPEGRRRLLASAKEAQKGNQMVLPEHLLTLLYHAKQC | |
| | LLPNQSESLAYVEQHQPEFQEILERVVDFAEVHTLAKSKVQQIV | |
| | KLFEANQTADVKEIAASFIQLMQFNAMGAPSTFKFFQKDIERA | |
| | RYTSIKEIFDATIIYQSPTGLYETRRKVVD | |
| Staphylococcus | KRNYILGLDIGITSVGYGIIDYETRDVIDAGVRLFKEANVENNE | SEQ ID NO: 54 |
| aureus | GRRSKRGARRLKRRRRHRIQRVKKLLFDYNLLTDHSELSGINP | |
| Cas9 | YEARVKGLSQKLSEEEFSAALLHLAKRRGVHNVNEVEEDTGN | |
| | ELSTKEQISRNSKALEEKYVAELQLERLKKDGEVRGSINRFKTS | |
| | DYVKEAKQLLKVQKAYHQLDQSFIDTYIDLLETRRTYYEGPGE | |
| | GSPFGWKDIKEWYEMLMGHCTYFPEELRSVKYAYNADLYNA | |
| | LNDLNNLVITRDENEKLEYYEKFQIIENVFKQKKKPTLKQIAKE | |
| | ILVNEEDIKGYRVTSTGKPEFTNLKVYHDIKDITARKEIIENAEL | |
| | LDQIAKILTIYQSSEDIQEELTNLNSELTQEEIEQISNLKGYTGTH | |
| | NLSLKAINLILDELWHTNDNQIAIFNRLKLVPKKVDLSQQKEIP | |
| | TTLVDDFILSPVVKRSFIQSIKVINAIIKKYGLPNDIIIELAREKNS | |
| | KDAQKMINEMQKRNRQTNERIEEIIRTTGKENAKYLIEKIKLHD | |
| | MQEGKCLYSLEAIPLEDLLNNPFNYEVDHIIPRSVSFDNSFNNK | |
| | VLVKQEENSKKGNRTPFQYLSSSDSKISYETFKKHILNLAKGKG | |
| | RISKTKKEYLLEERDINRFSVQKDFINRNLVDTRYATRGLMNLL | |
| | RSYFRVNNLDVKVKSINGGFTSFLRRKWKFKKERNKGYKHHA | |
| | EDALIIANADFIFKEWKKLDKAKKVMENQMFEEKQAESMPEIE | |
| | TEQEYKEIFITPHQIKHIKDFKDYKYSHRVDKKPNRELINDTLYS | |
| | TRKDDKGNTLIVNNLNGLYDKDNDKLKKLINKSPEKLLMYHH | |
| | DPQTYQKLKLIMEQYGDEKNPLYKYYEETGNYLTKYSKKDNG | |
| | PVIKKIKYYGNKLNAHLDITDDYPNSRNKVVKLSLKPYRFDVY | |
| | LDNGVYKFVTVKNLDVIKKENYYEVNSKCYEEAKKLKKISNQ | |
| | AEFIASFYNNDLIKINGELYRVIGVNNDLLNRIEVNMIDITYREY | |
| | LENMNDKRPPRIIKTIASKTQSIKKYSTDILGNLYEVKSKKHPQII | |
| | KKG | |
| Geobacillus | MKYKIGLDIGITSIGWAVINLDIPRIEDLGVRIFDRAENPKTGESL | SEQ ID NO: 55 |
| thermodenitrificans | ALPRRLARSARRRLRRRKHRLERIRRLFVREGILTKEELNKLFE | |
| Cas9 | KKHEIDVWQLRVEALDRKLNNDELARILLHLAKRRGFRSNRKS | |
| | ERTNKENSTMLKHIEENQSILSSYRTVAEMVVKDPKFSLHKRN | |
| | KEDNYTNTVARDDLEREIKLIFAKQREYGNIVCTEAFEHEYISI | |
| | WASQRPFASKDDIEKKVGFCTFEPKEKRAPKATYTFQSFTVWE | |
| | HINKLRLVSPGGIRALTDDERRLIYKQAFHKNKITFHDVRTLLN | |
| | LPDDTRFKGLLYDRNTTLKENEKVRFLELGAYHKIRKAIDSVY | |
| | GKGAAKSFRPIDFDTFGYALTMFKDDTDIRSYLRNEYEQNGKR | |
| | MENLADKVYDEELIEELLNLSFSKFGHLSLKALRNILPYMEQGE | |
| | VYSTACERAGYTFTGPKKKQKTVLLPNIPPIANPVVMRALTQA | |
| | RKVVNAIIKKYGSPVSIHIELARELSQSFDERRKMQKEQEGNRK | |
| | KNETAIRQLVEYGLTLNPTGLDIVKFKLWSEQNGKCAYSLQPIE | |
| | IERLLEPGYTEVDHVIPYSRSLDDSYTNKVLVLTKENREKGNRT | |
| | PAEYLGLGSERWQQFETFVLTNKQFSKKKRDRLLRLHYDENEE | |
| | NEFKNRNLNDTRYISRFLANFIREHLKFADSDDKQKVYTVNGR | |
| | ITAHLRSRWNFNKNREESNLHHAVDAAIVACTTPSDIARVTAF | |
| | YQRREQNKELSKKTDPQFPQPWPHFADELQARLSKNPKESIKA | |
| | LNLGNYDNEKLESLQPVFVSRMPKRSITGAAHQETLRRYIGIDE | |
| | RSGKIQTVVKKKLSEIQLDKTGHFPMYGKESDPRTYEAIRQRLL | |
| | EHNNDPKKAFQEPLYKPKKNGELGPIIRTIKIIDTTNQVIPLNDG | |
| | KTVAYNSNIVRVDVFEKDGKYYCVPIYTIDMMKGILPNKAIEP | |
| | NKPYSEWKEMTEDYTFRFSLYPNDLIRIEFPREKTIKTAVGEEIK | |
| | IKDLFAYYQTIDSSNGGLSLVSHDNNFSLRSIGSRTLKRFEKYQ | |
| | VDVLGNIYKVRGEKRVGVASSSHSKAGETIRPL | |
| ScCas9 | MEKKYSIGLDIGTNSVGWAVITDDYKVPSKKFKVLGNTNRKSI | SEQ ID NO: 56 |
| S. canis | KKNLMGALLFDSGETAEATRLKRTARRRYTRRKNRIRYLQEIF | |
| 1375 AA | ANEMAKLDDSFFQRLEESFLVEEDKKNERHPIFGNLADEVAYH | |
| 159.2 kDa | RNYPTIYHLRKKLADSPEKADLRLIYLALAHIIKFRGHFLIEGKL | |
| | NAENSDVAKLFYQLIQTYNQLFEESPLDEIEVDAKGILSARLSK | |
| | SKRLEKLIAVFPNEKKNGLFGNIIALALGLTPNFKSNFDLTEDA | |
| | KLQLSKDTYDDDLDELLGQIGDQYADLFSAAKNLSDAILLSDIL | |
| | RSNSEVTKAPLSASMVKRYDEHHQDLALLKTLVRQQFPEKYA | |
| | EIFKDDTKNGYAGYVGIGIKHRKRTTKLATQEEFYKFIKPILEK | |
| | MDGAEELLAKLNRDDLLRKQRTFDNGSIPHQIHLKELHAILRR | |
| | QEEFYPFLKENREKIEKILTFRIPYYVGPLARGNSRFAWLTRKSE | |
| | EAITPWNFEEVVDKGASAQSFIERMTNFDEQLPNKKVLPKHSL | |
| | LYEYFTVYNELTKVKYVTERMRKPEFLSGEQKKAIVDLLFKTN | |
| | RKVTVKQLKEDYFKKIECFDSVEIIGVEDRFNASLGTYHDLLKII | |
| | KDKDFLDNEENEDILEDIVLTLTLFEDREMIEERLKTYAHLFDD | |
| | KVMKQLKRRHYTGWGRLSRKMINGIRDKQSGKTILDFLKSDG | |
| | FSNRNFMQLIHDDSLTFKEEIEKAQVSGQGDSLHEQIADLAGSP | |
| | AIKKGILQTVKIVDELVKVMGHKPENIVIEMARENQTTTKGLQ | |
| | QSRERKKRIEEGIKELESQILKENPVENTQLQNEKLYLYYLQNG | |
| | RDMYVDQELDINRLSDYDVDHIVPQSFIKDDSIDNKVLTRSVE | |
| | NRGKSDNVPSEEVVKKMKNYWRQLLNAKLITQRKFDNLTKAE | |
| | RGGLSEADKAGFIKRQLVETRQITKHVARILDSRMNTKRDKND | |
| | KPIREVKVITLKSKLVSDFRKDFQLYKVRDINNYHHAHDAYLN | |
| | AVVGTALIKKYPKLESEFVYGDYKVYDVRKMIAKSEQEIGKAT | |
| | AKRFFYSNIMNFFKTEVKLANGEIRKRPLIETNGETGEVVWNK | |
| | EKDFATVRKVLAMPQVNIVKKTEVQTGGFSKESILSKRESAKLI | |
| | PRKKGWDTRKYGGFGSPTVAYSILVVAKVEKGKAKKLKSVKV | |
| | LVGITIMEKGSYEKDPIGFLEAKGYKDIKKELIFKLPKYSLFELE | |
| | NGRRRMLASATELQKANELVLPQHLVRLLYYTQNISATTGSNN | |
| | LGYIEQHREEFKEIFEKIIDFSEKYILKNKVNSNLKSSFDEQFAVS | |
| | DSILLSNSFVSLLKYTSFGASGGFTFLDLDVKQGRLRYQTVTEV | |
| | LDATLIYQSITGLYETRTDLSQLGGD | |

[0377] The prime editors described herein may include any of the above Cas9 ortholog sequences, or any variants thereof having at least 80%, at least 85%, at least 90%, at least 95%, or at least 99% sequence identity thereto.

[0378] The napDNAbp may include any suitable homologs and/or orthologs or enzymes, such as, Cas9. Cas9 homologs and/or orthologs have been described in various species, including, but not limited to, S. pyogenes and S. thermophilus. Preferably, the Cas moiety is configured (e.g., mutagenized, recombinantly engineered, or otherwise obtained from nature) as a nickase, i.e., capable of cleaving only a single strand of the target double stranded DNA. Additional suitable Cas9 nucleases and sequences will be apparent to those of skill in the art based on this disclosure, and such Cas9 nucleases and sequences include Cas9 sequences from the organisms and loci disclosed in Chylinski, Rhun, and Charpentier, “The tracrRNA and Cas9 families of type II CRISPR-Cas immunity systems” (2013) RNA Biology 10:5, 726-737; the entire contents of which are incorporated herein by reference. In some embodiments, a Cas9 nuclease has an inactive (e.g., an inactivated) DNA cleavage domain, that is, the Cas9 is a nickase. In some embodiments, the Cas9 protein comprises an amino acid sequence that is at least 80% identical to the amino acid sequence of a Cas9 protein as provided by any one of the variants of Table 3. In some embodiments, the Cas9 protein comprises an amino acid sequence that is at least 85%, at least 90%, at least 92%, at least 95%, at least 96%, at least 97%, at least 98%, at least 99%, or at least 99.5% identical to the amino acid sequence of a Cas9 protein as provided by any one of the Cas9 orthologs in the above tables.

C. Dead napDNAbp Variants

[0379] In some embodiments, the disclosed prime editors may comprise a catalytically inactive, or “dead,” napDNAbp domain. In certain embodiments, the prime editors described herein may include a dead Cas9, e.g., dead SpCas9, which has no nuclease activity due to one or more mutations that inactive both nuclease domains of Cas9, namely the RuvC domain (which cleaves the non-protospacer DNA strand) and HNH domain (which cleaves the protospacer DNA strand). The nuclease inactivation may be due to one or mutations that result in one or more substitutions and/or deletions in the amino acid sequence of the encoded protein, or any variants thereof having at least 80%, at least 85%, at least 90%, at least 95%, or at least 99% sequence identity thereto.

[0380] As used herein, the term “dCas9” refers to a nuclease-inactive Cas9 or nuclease-dead Cas9, or a functional fragment thereof, and embraces any naturally occurring dCas9 from any organism, any naturally-occurring dCas9 equivalent or functional fragment thereof, any dCas9 homolog, ortholog, or paralog from any organism, and any mutant or variant of a dCas9, naturally-occurring or engineered. The term dCas9 is not meant to be particularly limiting and may be referred to as a “dCas9 or equivalent.” Exemplary dCas9 proteins and method for making dCas9 proteins are further described herein and/or are described in the art and are incorporated herein by reference.

[0381] In other embodiments, dCas9 corresponds to, or comprises in part or in whole, a Cas9 amino acid sequence having one or more mutations that inactivate the Cas9 nuclease activity. In other embodiments, Cas9 variants having mutations other than D10A and H840A are provided which may result in the full or partial inactivation of the endogenous Cas9 nuclease activity (e.g., nCas9 or dCas9, respectively). Such mutations, by way of example, include other amino acid substitutions at D10 and H820, or other substitutions within the nuclease domains of Cas9 (e.g., substitutions in the HNH nuclease subdomain and/or the RuvC1 subdomain) with reference to a wild type sequence such as Cas9 from Streptococcus pyogenes (NCBI Reference Sequence: NC_017053.1). In some embodiments, variants or homologues of Cas9 (e.g., variants of Cas9 from Streptococcus pyogenes (NCBI Reference Sequence: NC_017053.1 (SEQ ID NO: 39)) are provided which are at least about 70% identical, at least about 80% identical, at least about 90% identical, at least about 95% identical, at least about 98% identical, at least about 99% identical, at least about 99.5% identical, or at least about 99.9% identical to NCBI Reference Sequence: NC_017053.1. In some embodiments, variants of dCas9 (e.g., variants of NCBI Reference Sequence: NC_017053.1 (SEQ ID NO: 39)) are provided having amino acid sequences which are shorter, or longer than NC_017053.1 (SEQ ID NO: 39) by about 5 amino acids, by about 10 amino acids, by about 15 amino acids, by about 20 amino acids, by about 25 amino acids, by about 30 amino acids, by about 40 amino acids, by about 50 amino acids, by about 75 amino acids, by about 100 amino acids or more.

[0382] In one embodiment, the dead Cas9 may be based on the canonical SpCas9 sequence of Q99ZW2 and may have the following sequence, which comprises a D10X and an H810X, wherein X may be any amino acid, substitutions (underlined and bolded), or a variant be variant of SEQ ID NO: 57 having at least 80%, at least 85%, at least 90%, at least 95%, or at least 99% sequence identity thereto.

[0383] In one embodiment, the dead Cas9 may be based on the canonical SpCas9 sequence of Q99ZW2 and may have the following sequence, which comprises a D1LA and an H81A substitutions (underlined and bolded), or be a variant of SEQ ID NO: 58 having at least 80%, at least 85%, at least 90%, at least 95%, or at least 99% sequence identity thereto.

| Description | Sequence | SEQ ID NO: |
|---|---|---|
| dead Cas9 or | MDKKYSIGLXIGTNSVGWAVITDEYKVPSKKFKVLGNTD | SEQ ID NO: 57 |
| dCas9 | RHSIKKNLIGALLFDSGETAEATRLKRTARRRYTRRKNRI | |
| Streptococcus | CYLQEIFSNEMAKVDDSFFHRLEESFLVEEDKKHERHPIF | |
| pyogenes | GNIVDEVAYHEKYPTIYHLRKKLVDSTDKADLRLIYLAL | |
| Q99ZW2 | AHMIKFRGHFLIEGDLNPDNSDVDKLFIQLVQTYNQLFEE | |
| Cas9 with | NPINASGVDAKAILSARLSKSRRLENLIAQLPGEKKNGLF | |
| D10X and | GNLIALSLGLTPNFKSNFDLAEDAKLQLSKDTYDDDLDN | |
| H810X | LLAQIGDQYADLFLAAKNLSDAILLSDILRVNTEITKAPLS | |
| Where “X” is | ASMIKRYDEHHQDLTLLKALVRQQLPEKYKEIFFDQSKN | |
| any amino | GYAGYIDGGASQEEFYKFIKPILEKMDGTEELLVKLNRE | |
| acid | DLLRKQRTFDNGSIPHQIHLGELHAILRRQEDFYPFLKDN | |
| | REKIEKILTFRIPYYVGPLARGNSRFAWMTRKSEETITPW | |
| | NFEEVVDKGASAQSFIERMTNFDKNLPNEKVLPKHSLLY | |
| | EYFTVYNELTKVKYVTEGMRKPAFLSGEQKKAIVDLLFK | |
| | TNRKVTVKQLKEDYFKKIECFDSVEISGVEDRFNASLGT | |
| | YHDLLKIIKDKDFLDNEENEDILEDIVLTLTLFEDREMIEE | |
| | RLKTYAHLFDDKVMKQLKRRRYTGWGRLSRKLINGIRD | |
| | KQSGKTILDFLKSDGFANRNFMQLIHDDSLTFKEDIQKAQ | |
| | VSGQGDSLHEHIANLAGSPAIKKGILQTVKVVDELVKVM | |
| | GRHKPENIVIEMARENQTTQKGQKNSRERMKRIEEGIKE | |
| | LGSQILKEHPVENTQLQNEKLYLYYLQNGRDMYVDQEL | |
| | DINRLSDYDVDXIVPQSFLKDDSIDNKVLTRSDKNRGKS | |
| | DNVPSEEVVKKMKNYWRQLLNAKLITQRKFDNLTKAER | |
| | GGLSELDKAGFIKRQLVETRQITKHVAQILDSRMNTKYD | |
| | ENDKLIREVKVITLKSKLVSDFRKDFQFYKVREINNYHH | |
| | AHDAYLNAVVGTALIKKYPKLESEFVYGDYKVYDVRK | |
| | MIAKSEQEIGKATAKYFFYSNIMNFFKTEITLANGEIRKRP | |
| | LIETNGETGEIVWDKGRDFATVRKVLSMPQVNIVKKTEV | |
| | QTGGFSKESILPKRNSDKLIARKKDWDPKKYGGFDSPTV | |
| | AYSVLVVAKVEKGKSKKLKSVKELLGITIMERSSFEKNPI | |
| | DFLEAKGYKEVKKDLIIKLPKYSLFELENGRKRMLASAG | |
| | ELQKGNELALPSKYVNFLYLASHYEKLKGSPEDNEQKQL | |
| | FVEQHKHYLDEIIEQISEFSKRVILADANLDKVLSAYNKH | |
| | RDKPIREQAENIIHLFTLTNLGAPAAFKYFDTTIDRKRYTS | |
| | TKEVLDATLIHQSITGLYETRIDLSQLGGD | |
| dead Cas9 or | MDKKYSIGLAIGTNSVGWAVITDEYKVPSKKFKVLGNTD | SEQ ID NO: 58 |
| dCas9 | RHSIKKNLIGALLFDSGETAEATRLKRTARRRYTRRKNRI | |
| Streptococcus | CYLQEIFSNEMAKVDDSFFHRLEESFLVEEDKKHERHPIF | |
| pyogenes | GNIVDEVAYHEKYPTIYHLRKKLVDSTDKADLRLIYLAL | |
| Q99ZW2 | AHMIKFRGHFLIEGDLNPDNSDVDKLFIQLVQTYNQLFEE | |
| Cas9 with | NPINASGVDAKAILSARLSKSRRLENLIAQLPGEKKNGLF | |
| D10A and | GNLIALSLGLTPNFKSNFDLAEDAKLQLSKDTYDDDLDN | |
| H810A | LLAQIGDQYADLFLAAKNLSDAILLSDILRVNTEITKAPLS | |
| | ASMIKRYDEHHQDLTLLKALVRQQLPEKYKEIFFDQSKN | |
| | GYAGYIDGGASQEEFYKFIKPILEKMDGTEELLVKLNRE | |
| | DLLRKQRTFDNGSIPHQIHLGELHAILRRQEDFYPFLKDN | |
| | REKIEKILTFRIPYYVGPLARGNSRFAWMTRKSEETITPW | |
| | NFEEVVDKGASAQSFIERMTNFDKNLPNEKVLPKHSLLY | |
| | EYFTVYNELTKVKYVTEGMRKPAFLSGEQKKAIVDLLFK | |
| | TNRKVTVKQLKEDYFKKIECFDSVEISGVEDRFNASLGT | |
| | YHDLLKIIKDKDFLDNEENEDILEDIVLTLTLFEDREMIEE | |
| | RLKTYAHLFDDKVMKQLKRRRYTGWGRLSRKLINGIRD | |
| | KQSGKTILDFLKSDGFANRNFMQLIHDDSLTFKEDIQKAQ | |
| | VSGQGDSLHEHIANLAGSPAIKKGILQTVKVVDELVKVM | |
| | GRHKPENIVIEMARENQTTQKGQKNSRERMKRIEEGIKE | |
| | LGSQILKEHPVENTQLQNEKLYLYYLQNGRDMYVDQEL | |
| | DINRLSDYDVDAIVPQSFLKDDSIDNKVLTRSDKNRGKS | |
| | DNVPSEEVVKKMKNYWRQLLNAKLITQRKFDNLTKAER | |
| | GGLSELDKAGFIKRQLVETRQITKHVAQILDSRMNTKYD | |
| | ENDKLIREVKVITLKSKLVSDFRKDFQFYKVREINNYHH | |
| | AHDAYLNAVVGTALIKKYPKLESEFVYGDYKVYDVRK | |
| | MIAKSEQEIGKATAKYFFYSNIMNFFKTEITLANGEIRKRP | |
| | LIETNGETGEIVWDKGRDFATVRKVLSMPQVNIVKKTEV | |
| | QTGGFSKESILPKRNSDKLIARKKDWDPKKYGGFDSPTV | |
| | AYSVLVVAKVEKGKSKKLKSVKELLGITIMERSSFEKNPI | |
| | DFLEAKGYKEVKKDLIIKLPKYSLFELENGRKRMLASAG | |
| | ELQKGNELALPSKYVNFLYLASHYEKLKGSPEDNEQKQL | |
| | FVEQHKHYLDEIIEQISEFSKRVILADANLDKVLSAYNKH | |
| | RDKPIREQAENIIHLFTLTNLGAPAAFKYFDTTIDRKRYTS | |
| | TKEVLDATLIHQSITGLYETRIDLSQLGGD | |

D. napDNAbp Nickase Variants

[0384] In some embodiments, the disclosed base editors may comprise a napDNAbp domain that comprises a nickase. In one embodiment, the prime editors described herein comprise a Cas9 nickase. The term “Cas9 nickase” or “nCas9” refers to a variant of Cas9 which is capable of introducing a single-strand break in a double strand DNA molecule target. In some embodiments, the Cas9 nickase comprises only a single functioning nuclease domain. The wild type Cas9 (e.g., the canonical SpCas9) comprises two separate nuclease domains, namely, the RuvC domain (which cleaves the non-protospacer DNA strand) and HNH domain (which cleaves the protospacer DNA strand). In one embodiment, the Cas9 nickase comprises a mutation in the RuvC domain which inactivates the RuvC nuclease activity. For example, mutations in aspartate (D) 10, histidine (H) 983, aspartate (D) 986, or glutamate (E) 762, have been reported as loss-of-function mutations of the RuvC nuclease domain and the creation of a functional Cas9 nickase (e.g., Nishimasu et al., “Crystal structure of Cas9 in complex with guide RNA and target DNA,” Cell 156(5), 935-949, which is incorporated herein by reference). Thus, nickase mutations in the RuvC domain could include DOX, H983X, D986X, or E762X, wherein X is any amino acid other than the wild type amino acid. In certain embodiments, the nickase could be D1A, of H983A, or D986A, or E762A, or a combination thereof.

[0385] In various embodiments, the Cas9 nickase can have a mutation in the RuvC nuclease domain and have one of the following amino acid sequences, or a variant thereof having an amino acid sequence that has at least 80%, at least 85%, at least 90%, at least 95%, or at least 99% sequence identity thereto.

| Description | Sequence | SEQ ID NO: |
|---|---|---|
| Cas9 nickase | MDKKYSIGLXIGTNSVGWAVITDEYKVPSKKFKVLGNTD | SEQ ID NO: 59 |
| Streptococcus | RHSIKKNLIGALLFDSGETAEATRLKRTARRRYTRRKNRI | |
| pyogenes | CYLQEIFSNEMAKVDDSFFHRLEESFLVEEDKKHERHPIF | |
| Q99ZW2 | GNIVDEVAYHEKYPTIYHLRKKLVDSTDKADLRLIYLAL | |
| Cas9 with | AHMIKFRGHFLIEGDLNPDNSDVDKLFIQLVQTYNQLFEE | |
| D10X, | NPINASGVDAKAILSARLSKSRRLENLIAQLPGEKKNGLF | |
| wherein X is | GNLIALSLGLTPNFKSNFDLAEDAKLQLSKDTYDDDLDN | |
| any alternate | LLAQIGDQYADLFLAAKNLSDAILLSDILRVNTEITKAPLS | |
| amino acid | ASMIKRYDEHHQDLTLLKALVRQQLPEKYKEIFFDQSKN | |
| | GYAGYIDGGASQEEFYKFIKPILEKMDGTEELLVKLNRE | |
| | DLLRKQRTFDNGSIPHQIHLGELHAILRRQEDFYPFLKDN | |
| | REKIEKILTFRIPYYVGPLARGNSRFAWMTRKSEETITPW | |
| | NFEEVVDKGASAQSFIERMTNFDKNLPNEKVLPKHSLLY | |
| | EYFTVYNELTKVKYVTEGMRKPAFLSGEQKKAIVDLLFK | |
| | TNRKVTVKQLKEDYFKKIECFDSVEISGVEDRFNASLGT | |
| | YHDLLKIIKDKDFLDNEENEDILEDIVLTLTLFEDREMIEE | |
| | RLKTYAHLFDDKVMKQLKRRRYTGWGRLSRKLINGIRD | |
| | KQSGKTILDFLKSDGFANRNFMQLIHDDSLTFKEDIQKAQ | |
| | VSGQGDSLHEHIANLAGSPAIKKGILQTVKVVDELVKVM | |
| | GRHKPENIVIEMARENQTTQKGQKNSRERMKRIEEGIKE | |
| | LGSQILKEHPVENTQLQNEKLYLYYLQNGRDMYVDQEL | |
| | DINRLSDYDVDHIVPQSFLKDDSIDNKVLTRSDKNRGKS | |
| | DNVPSEEVVKKMKNYWRQLLNAKLITQRKFDNLTKAER | |
| | GGLSELDKAGFIKRQLVETRQITKHVAQILDSRMNTKYD | |
| | ENDKLIREVKVITLKSKLVSDFRKDFQFYKVREINNYHH | |
| | AHDAYLNAVVGTALIKKYPKLESEFVYGDYKVYDVRK | |
| | MIAKSEQEIGKATAKYFFYSNIMNFFKTEITLANGEIRKRP | |
| | LIETNGETGEIVWDKGRDFATVRKVLSMPQVNIVKKTEV | |
| | QTGGFSKESILPKRNSDKLIARKKDWDPKKYGGFDSPTV | |
| | AYSVLVVAKVEKGKSKKLKSVKELLGITIMERSSFEKNPI | |
| | DFLEAKGYKEVKKDLIIKLPKYSLFELENGRKRMLASAG | |
| | ELQKGNELALPSKYVNFLYLASHYEKLKGSPEDNEQKQL | |
| | FVEQHKHYLDEIIEQISEFSKRVILADANLDKVLSAYNKH | |
| | RDKPIREQAENIIHLFTLTNLGAPAAFKYFDTTIDRKRYTS | |
| | TKEVLDATLIHQSITGLYETRIDLSQLGGD | |
| Cas9 nickase | MDKKYSIGLDIGTNSVGWAVITDEYKVPSKKFKVLGNTD | SEQ ID NO: 60 |
| Streptococcus | RHSIKKNLIGALLFDSGETAEATRLKRTARRRYTRRKNRI | |
| pyogenes | CYLQEIFSNEMAKVDDSFFHRLEESFLVEEDKKHERHPIF | |
| Q99ZW2 | GNIVDEVAYHEKYPTIYHLRKKLVDSTDKADLRLIYLAL | |
| Cas9 with | AHMIKFRGHFLIEGDLNPDNSDVDKLFIQLVQTYNQLFEE | |
| E762X, | NPINASGVDAKAILSARLSKSRRLENLIAQLPGEKKNGLF | |
| wherein X is | GNLIALSLGLTPNFKSNFDLAEDAKLQLSKDTYDDDLDN | |
| any alternate | LLAQIGDQYADLFLAAKNLSDAILLSDILRVNTEITKAPLS | |
| amino acid | ASMIKRYDEHHQDLTLLKALVRQQLPEKYKEIFFDQSKN | |
| | GYAGYIDGGASQEEFYKFIKPILEKMDGTEELLVKLNRE | |
| | DLLRKQRTFDNGSIPHQIHLGELHAILRRQEDFYPFLKDN | |
| | REKIEKILTFRIPYYVGPLARGNSRFAWMTRKSEETITPW | |
| | NFEEVVDKGASAQSFIERMTNFDKNLPNEKVLPKHSLLY | |
| | EYFTVYNELTKVKYVTEGMRKPAFLSGEQKKAIVDLLFK | |
| | TNRKVTVKQLKEDYFKKIECFDSVEISGVEDRFNASLGT | |
| | YHDLLKIIKDKDFLDNEENEDILEDIVLTLTLFEDREMIEE | |
| | RLKTYAHLFDDKVMKQLKRRRYTGWGRLSRKLINGIRD | |
| | KQSGKTILDFLKSDGFANRNFMQLIHDDSLTFKEDIQKAQ | |
| | VSGQGDSLHEHIANLAGSPAIKKGILQTVKVVDELVKVM | |
| | GRHKPENIVIXMARENQTTQKGQKNSRERMKRIEEGIKE | |
| | LGSQILKEHPVENTQLQNEKLYLYYLQNGRDMYVDQEL | |
| | DINRLSDYDVDHIVPQSFLKDDSIDNKVLTRSDKNRGKS | |
| | DNVPSEEVVKKMKNYWRQLLNAKLITQRKFDNLTKAER | |
| | GGLSELDKAGFIKRQLVETRQITKHVAQILDSRMNTKYD | |
| | ENDKLIREVKVITLKSKLVSDFRKDFQFYKVREINNYHH | |
| | AHDAYLNAVVGTALIKKYPKLESEFVYGDYKVYDVRK | |
| | MIAKSEQEIGKATAKYFFYSNIMNFFKTEITLANGEIRKRP | |
| | LIETNGETGEIVWDKGRDFATVRKVLSMPQVNIVKKTEV | |
| | QTGGFSKESILPKRNSDKLIARKKDWDPKKYGGFDSPTV | |
| | AYSVLVVAKVEKGKSKKLKSVKELLGITIMERSSFEKNPI | |
| | DFLEAKGYKEVKKDLIIKLPKYSLFELENGRKRMLASAG | |
| | ELQKGNELALPSKYVNFLYLASHYEKLKGSPEDNEQKQL | |
| | FVEQHKHYLDEIIEQISEFSKRVILADANLDKVLSAYNKH | |
| | RDKPIREQAENIIHLFTLTNLGAPAAFKYFDTTIDRKRYTS | |
| | TKEVLDATLIHQSITGLYETRIDLSQLGGD | |
| Cas9 nickase | MDKKYSIGLDIGTNSVGWAVITDEYKVPSKKFKVLGNTD | SEQ ID NO: 61 |
| Streptococcus | RHSIKKNLIGALLFDSGETAEATRLKRTARRRYTRRKNRI | |
| pyogenes | CYLQEIFSNEMAKVDDSFFHRLEESFLVEEDKKHERHPIF | |
| Q99ZW2 | GNIVDEVAYHEKYPTIYHLRKKLVDSTDKADLRLIYLAL | |
| Cas9 with | AHMIKFRGHFLIEGDLNPDNSDVDKLFIQLVQTYNQLFEE | |
| H983X, | NPINASGVDAKAILSARLSKSRRLENLIAQLPGEKKNGLF | |
| wherein X is | GNLIALSLGLTPNFKSNFDLAEDAKLQLSKDTYDDDLDN | |
| any alternate | LLAQIGDQYADLFLAAKNLSDAILLSDILRVNTEITKAPLS | |
| amino acid | ASMIKRYDEHHQDLTLLKALVRQQLPEKYKEIFFDQSKN | |
| | GYAGYIDGGASQEEFYKFIKPILEKMDGTEELLVKLNRE | |
| | DLLRKQRTFDNGSIPHQIHLGELHAILRRQEDFYPFLKDN | |
| | REKIEKILTFRIPYYVGPLARGNSRFAWMTRKSEETITPW | |
| | NFEEVVDKGASAQSFIERMTNFDKNLPNEKVLPKHSLLY | |
| | EYFTVYNELTKVKYVTEGMRKPAFLSGEQKKAIVDLLFK | |
| | TNRKVTVKQLKEDYFKKIECFDSVEISGVEDRFNASLGT | |
| | YHDLLKIIKDKDFLDNEENEDILEDIVLTLTLFEDREMIEE | |
| | RLKTYAHLFDDKVMKQLKRRRYTGWGRLSRKLINGIRD | |
| | KQSGKTILDFLKSDGFANRNFMQLIHDDSLTFKEDIQKAQ | |
| | VSGQGDSLHEHIANLAGSPAIKKGILQTVKVVDELVKVM | |
| | GRHKPENIVIEMARENQTTQKGQKNSRERMKRIEEGIKE | |
| | LGSQILKEHPVENTQLQNEKLYLYYLQNGRDMYVDQEL | |
| | DINRLSDYDVDHIVPQSFLKDDSIDNKVLTRSDKNRGKS | |
| | DNVPSEEVVKKMKNYWRQLLNAKLITQRKFDNLTKAER | |
| | GGLSELDKAGFIKRQLVETRQITKHVAQILDSRMNTKYD | |
| | ENDKLIREVKVITLKSKLVSDFRKDFQFYKVREINNYHX | |
| | AHDAYLNAVVGTALIKKYPKLESEFVYGDYKVYDVRK | |
| | MIAKSEQEIGKATAKYFFYSNIMNFFKTEITLANGEIRKRP | |
| | LIETNGETGEIVWDKGRDFATVRKVLSMPQVNIVKKTEV | |
| | QTGGFSKESILPKRNSDKLIARKKDWDPKKYGGFDSPTV | |
| | AYSVLVVAKVEKGKSKKLKSVKELLGITIMERSSFEKNPI | |
| | DFLEAKGYKEVKKDLIIKLPKYSLFELENGRKRMLASAG | |
| | ELQKGNELALPSKYVNFLYLASHYEKLKGSPEDNEQKQL | |
| | FVEQHKHYLDEIIEQISEFSKRVILADANLDKVLSAYNKH | |
| | RDKPIREQAENIIHLFTLTNLGAPAAFKYFDTTIDRKRYTS | |
| | TKEVLDATLIHQSITGLYETRIDLSQLGGD | |
| Cas9 nickase | MDKKYSIGLDIGTNSVGWAVITDEYKVPSKKFKVLGNTD | SEQ ID NO: 62 |
| Streptococcus | RHSIKKNLIGALLFDSGETAEATRLKRTARRRYTRRKNRI | |
| pyogenes | CYLQEIFSNEMAKVDDSFFHRLEESFLVEEDKKHERHPIF | |
| Q99ZW2 | GNIVDEVAYHEKYPTIYHLRKKLVDSTDKADLRLIYLAL | |
| Cas9 with | AHMIKFRGHFLIEGDLNPDNSDVDKLFIQLVQTYNQLFEE | |
| D986X, | NPINASGVDAKAILSARLSKSRRLENLIAQLPGEKKNGLF | |
| wherein X is | GNLIALSLGLTPNFKSNFDLAEDAKLQLSKDTYDDDLDN | |
| any alternate | LLAQIGDQYADLFLAAKNLSDAILLSDILRVNTEITKAPLS | |
| amino acid | ASMIKRYDEHHQDLTLLKALVRQQLPEKYKEIFFDQSKN | |
| | GYAGYIDGGASQEEFYKFIKPILEKMDGTEELLVKLNRE | |
| | DLLRKQRTFDNGSIPHQIHLGELHAILRRQEDFYPFLKDN | |
| | REKIEKILTFRIPYYVGPLARGNSRFAWMTRKSEETITPW | |
| | NFEEVVDKGASAQSFIERMTNFDKNLPNEKVLPKHSLLY | |
| | EYFTVYNELTKVKYVTEGMRKPAFLSGEQKKAIVDLLFK | |
| | TNRKVTVKQLKEDYFKKIECFDSVEISGVEDRFNASLGT | |
| | YHDLLKIIKDKDFLDNEENEDILEDIVLTLTLFEDREMIEE | |
| | RLKTYAHLFDDKVMKQLKRRRYTGWGRLSRKLINGIRD | |
| | KQSGKTILDFLKSDGFANRNFMQLIHDDSLTFKEDIQKAQ | |
| | VSGQGDSLHEHIANLAGSPAIKKGILQTVKVVDELVKVM | |
| | GRHKPENIVIEMARENQTTQKGQKNSRERMKRIEEGIKE | |
| | LGSQILKEHPVENTQLQNEKLYLYYLQNGRDMYVDQEL | |
| | DINRLSDYDVDHIVPQSFLKDDSIDNKVLTRSDKNRGKS | |
| | DNVPSEEVVKKMKNYWRQLLNAKLITQRKFDNLTKAER | |
| | GGLSELDKAGFIKRQLVETRQITKHVAQILDSRMNTKYD | |
| | ENDKLIREVKVITLKSKLVSDFRKDFQFYKVREINNYHH | |
| | AHXAYLNAVVGTALIKKYPKLESEFVYGDYKVYDVRK | |
| | MIAKSEQEIGKATAKYFFYSNIMNFFKTEITLANGEIRKRP | |
| | LIETNGETGEIVWDKGRDFATVRKVLSMPQVNIVKKTEV | |
| | QTGGFSKESILPKRNSDKLIARKKDWDPKKYGGFDSPTV | |
| | AYSVLVVAKVEKGKSKKLKSVKELLGITIMERSSFEKNPI | |
| | DFLEAKGYKEVKKDLIIKLPKYSLFELENGRKRMLASAG | |
| | ELQKGNELALPSKYVNFLYLASHYEKLKGSPEDNEQKQL | |
| | FVEQHKHYLDEIIEQISEFSKRVILADANLDKVLSAYNKH | |
| | RDKPIREQAENIIHLFTLTNLGAPAAFKYFDTTIDRKRYTS | |
| | TKEVLDATLIHQSITGLYETRIDLSQLGGD | |
| Cas9 nickase | MDKKYSIGLAIGTNSVGWAVITDEYKVPSKKFKVLGNTD | SEQ ID NO: 63 |
| Streptococcus | RHSIKKNLIGALLFDSGETAEATRLKRTARRRYTRRKNRI | |
| pyogenes | CYLQEIFSNEMAKVDDSFFHRLEESFLVEEDKKHERHPIF | |
| Q99ZW2 | GNIVDEVAYHEKYPTIYHLRKKLVDSTDKADLRLIYLAL | |
| Cas9 with | AHMIKFRGHFLIEGDLNPDNSDVDKLFIQLVQTYNQLFEE | |
| D10A | NPINASGVDAKAILSARLSKSRRLENLIAQLPGEKKNGLF | |
| | GNLIALSLGLTPNFKSNFDLAEDAKLQLSKDTYDDDLDN | |
| | LLAQIGDQYADLFLAAKNLSDAILLSDILRVNTEITKAPLS | |
| | ASMIKRYDEHHQDLTLLKALVRQQLPEKYKEIFFDQSKN | |
| | GYAGYIDGGASQEEFYKFIKPILEKMDGTEELLVKLNRE | |
| | DLLRKQRTFDNGSIPHQIHLGELHAILRRQEDFYPFLKDN | |
| | REKIEKILTFRIPYYVGPLARGNSRFAWMTRKSEETITPW | |
| | NFEEVVDKGASAQSFIERMTNFDKNLPNEKVLPKHSLLY | |
| | EYFTVYNELTKVKYVTEGMRKPAFLSGEQKKAIVDLLFK | |
| | TNRKVTVKQLKEDYFKKIECFDSVEISGVEDRFNASLGT | |
| | YHDLLKIIKDKDFLDNEENEDILEDIVLTLTLFEDREMIEE | |
| | RLKTYAHLFDDKVMKQLKRRRYTGWGRLSRKLINGIRD | |
| | KQSGKTILDFLKSDGFANRNFMQLIHDDSLTFKEDIQKAQ | |
| | VSGQGDSLHEHIANLAGSPAIKKGILQTVKVVDELVKVM | |
| | GRHKPENIVIEMARENQTTQKGQKNSRERMKRIEEGIKE | |
| | LGSQILKEHPVENTQLQNEKLYLYYLQNGRDMYVDQEL | |
| | DINRLSDYDVDHIVPQSFLKDDSIDNKVLTRSDKNRGKS | |
| | DNVPSEEVVKKMKNYWRQLLNAKLITQRKFDNLTKAER | |
| | GGLSELDKAGFIKRQLVETRQITKHVAQILDSRMNTKYD | |
| | ENDKLIREVKVITLKSKLVSDFRKDFQFYKVREINNYHH | |
| | AHDAYLNAVVGTALIKKYPKLESEFVYGDYKVYDVRK | |
| | MIAKSEQEIGKATAKYFFYSNIMNFFKTEITLANGEIRKRP | |
| | LIETNGETGEIVWDKGRDFATVRKVLSMPQVNIVKKTEV | |
| | QTGGFSKESILPKRNSDKLIARKKDWDPKKYGGFDSPTV | |
| | AYSVLVVAKVEKGKSKKLKSVKELLGITIMERSSFEKNPI | |
| | DFLEAKGYKEVKKDLIIKLPKYSLFELENGRKRMLASAG | |
| | ELQKGNELALPSKYVNFLYLASHYEKLKGSPEDNEQKQL | |
| | FVEQHKHYLDEIIEQISEFSKRVILADANLDKVLSAYNKH | |
| | RDKPIREQAENIIHLFTLTNLGAPAAFKYFDTTIDRKRYTS | |
| | TKEVLDATLIHQSITGLYETRIDLSQLGGD | |
| Cas9 nickase | MDKKYSIGLDIGTNSVGWAVITDEYKVPSKKFKVLGNTD | SEQ ID NO: 64 |
| Streptococcus | RHSIKKNLIGALLFDSGETAEATRLKRTARRRYTRRKNRI | |
| pyogenes | CYLQEIFSNEMAKVDDSFFHRLEESFLVEEDKKHERHPIF | |
| Q99ZW2 | GNIVDEVAYHEKYPTIYHLRKKLVDSTDKADLRLIYLAL | |
| Cas9 with | AHMIKFRGHFLIEGDLNPDNSDVDKLFIQLVQTYNQLFEE | |
| E762A | NPINASGVDAKAILSARLSKSRRLENLIAQLPGEKKNGLF | |
| | GNLIALSLGLTPNFKSNFDLAEDAKLQLSKDTYDDDLDN | |
| | LLAQIGDQYADLFLAAKNLSDAILLSDILRVNTEITKAPLS | |
| | ASMIKRYDEHHQDLTLLKALVRQQLPEKYKEIFFDQSKN | |
| | GYAGYIDGGASQEEFYKFIKPILEKMDGTEELLVKLNRE | |
| | DLLRKQRTFDNGSIPHQIHLGELHAILRRQEDFYPFLKDN | |
| | REKIEKILTFRIPYYVGPLARGNSRFAWMTRKSEETITPW | |
| | NFEEVVDKGASAQSFIERMTNFDKNLPNEKVLPKHSLLY | |
| | EYFTVYNELTKVKYVTEGMRKPAFLSGEQKKAIVDLLFK | |
| | TNRKVTVKQLKEDYFKKIECFDSVEISGVEDRFNASLGT | |
| | YHDLLKIIKDKDFLDNEENEDILEDIVLTLTLFEDREMIEE | |
| | RLKTYAHLFDDKVMKQLKRRRYTGWGRLSRKLINGIRD | |
| | KQSGKTILDFLKSDGFANRNFMQLIHDDSLTFKEDIQKAQ | |
| | VSGQGDSLHEHIANLAGSPAIKKGILQTVKVVDELVKVM | |
| | GRHKPENIVIAMARENQTTQKGQKNSRERMKRIEEGIKE | |
| | LGSQILKEHPVENTQLQNEKLYLYYLQNGRDMYVDQEL | |
| | DINRLSDYDVDHIVPQSFLKDDSIDNKVLTRSDKNRGKS | |
| | DNVPSEEVVKKMKNYWRQLLNAKLITQRKFDNLTKAER | |
| | GGLSELDKAGFIKRQLVETRQITKHVAQILDSRMNTKYD | |
| | ENDKLIREVKVITLKSKLVSDFRKDFQFYKVREINNYHH | |
| | AHDAYLNAVVGTALIKKYPKLESEFVYGDYKVYDVRK | |
| | MIAKSEQEIGKATAKYFFYSNIMNFFKTEITLANGEIRKRP | |
| | LIETNGETGEIVWDKGRDFATVRKVLSMPQVNIVKKTEV | |
| | QTGGFSKESILPKRNSDKLIARKKDWDPKKYGGFDSPTV | |
| | AYSVLVVAKVEKGKSKKLKSVKELLGITIMERSSFEKNPI | |
| | DFLEAKGYKEVKKDLIIKLPKYSLFELENGRKRMLASAG | |
| | ELQKGNELALPSKYVNFLYLASHYEKLKGSPEDNEQKQL | |
| | FVEQHKHYLDEIIEQISEFSKRVILADANLDKVLSAYNKH | |
| | RDKPIREQAENIIHLFTLTNLGAPAAFKYFDTTIDRKRYTS | |
| | TKEVLDATLIHQSITGLYETRIDLSQLGGD | |
| Cas9 nickase | MDKKYSIGLDIGTNSVGWAVITDEYKVPSKKFKVLGNTD | SEQ ID NO: 65 |
| Streptococcus | RHSIKKNLIGALLFDSGETAEATRLKRTARRRYTRRKNRI | |
| pyogenes | CYLQEIFSNEMAKVDDSFFHRLEESFLVEEDKKHERHPIF | |
| Q99ZW2 | GNIVDEVAYHEKYPTIYHLRKKLVDSTDKADLRLIYLAL | |
| Cas9 with | AHMIKFRGHFLIEGDLNPDNSDVDKLFIQLVQTYNQLFEE | |
| H983A | NPINASGVDAKAILSARLSKSRRLENLIAQLPGEKKNGLF | |
| | GNLIALSLGLTPNFKSNFDLAEDAKLQLSKDTYDDDLDN | |
| | LLAQIGDQYADLFLAAKNLSDAILLSDILRVNTEITKAPLS | |
| | ASMIKRYDEHHQDLTLLKALVRQQLPEKYKEIFFDQSKN | |
| | GYAGYIDGGASQEEFYKFIKPILEKMDGTEELLVKLNRE | |
| | DLLRKQRTFDNGSIPHQIHLGELHAILRRQEDFYPFLKDN | |
| | REKIEKILTFRIPYYVGPLARGNSRFAWMTRKSEETITPW | |
| | NFEEVVDKGASAQSFIERMTNFDKNLPNEKVLPKHSLLY | |
| | EYFTVYNELTKVKYVTEGMRKPAFLSGEQKKAIVDLLFK | |
| | TNRKVTVKQLKEDYFKKIECFDSVEISGVEDRFNASLGT | |
| | YHDLLKIIKDKDFLDNEENEDILEDIVLTLTLFEDREMIEE | |
| | RLKTYAHLFDDKVMKQLKRRRYTGWGRLSRKLINGIRD | |
| | KQSGKTILDFLKSDGFANRNFMQLIHDDSLTFKEDIQKAQ | |
| | VSGQGDSLHEHIANLAGSPAIKKGILQTVKVVDELVKVM | |
| | GRHKPENIVIEMARENQTTQKGQKNSRERMKRIEEGIKE | |
| | LGSQILKEHPVENTQLQNEKLYLYYLQNGRDMYVDQEL | |
| | DINRLSDYDVDHIVPQSFLKDDSIDNKVLTRSDKNRGKS | |
| | DNVPSEEVVKKMKNYWRQLLNAKLITQRKFDNLTKAER | |
| | GGLSELDKAGFIKRQLVETRQITKHVAQILDSRMNTKYD | |
| | ENDKLIREVKVITLKSKLVSDFRKDFQFYKVREINNYHA | |
| | AHDAYLNAVVGTALIKKYPKLESEFVYGDYKVYDVRK | |
| | MIAKSEQEIGKATAKYFFYSNIMNFFKTEITLANGEIRKRP | |
| | LIETNGETGEIVWDKGRDFATVRKVLSMPQVNIVKKTEV | |
| | QTGGFSKESILPKRNSDKLIARKKDWDPKKYGGFDSPTV | |
| | AYSVLVVAKVEKGKSKKLKSVKELLGITIMERSSFEKNPI | |
| | DFLEAKGYKEVKKDLIIKLPKYSLFELENGRKRMLASAG | |
| | ELQKGNELALPSKYVNFLYLASHYEKLKGSPEDNEQKQL | |
| | FVEQHKHYLDEIIEQISEFSKRVILADANLDKVLSAYNKH | |
| | RDKPIREQAENIIHLFTLTNLGAPAAFKYFDTTIDRKRYTS | |
| | TKEVLDATLIHQSITGLYETRIDLSQLGGD | |
| Cas9 nickase | MDKKYSIGLDIGTNSVGWAVITDEYKVPSKKFKVLGNTD | SEQ ID NO: 66 |
| Streptococcus | RHSIKKNLIGALLFDSGETAEATRLKRTARRRYTRRKNRI | |
| pyogenes | CYLQEIFSNEMAKVDDSFFHRLEESFLVEEDKKHERHPIF | |
| Q99ZW2 | GNIVDEVAYHEKYPTIYHLRKKLVDSTDKADLRLIYLAL | |
| Cas9 with | AHMIKFRGHFLIEGDLNPDNSDVDKLFIQLVQTYNQLFEE | |
| D986A | NPINASGVDAKAILSARLSKSRRLENLIAQLPGEKKNGLF | |
| | GNLIALSLGLTPNFKSNFDLAEDAKLQLSKDTYDDDLDN | |
| | LLAQIGDQYADLFLAAKNLSDAILLSDILRVNTEITKAPLS | |
| | ASMIKRYDEHHQDLTLLKALVRQQLPEKYKEIFFDQSKN | |
| | GYAGYIDGGASQEEFYKFIKPILEKMDGTEELLVKLNRE | |
| | DLLRKQRTFDNGSIPHQIHLGELHAILRRQEDFYPFLKDN | |
| | REKIEKILTFRIPYYVGPLARGNSRFAWMTRKSEETITPW | |
| | NFEEVVDKGASAQSFIERMTNFDKNLPNEKVLPKHSLLY | |
| | EYFTVYNELTKVKYVTEGMRKPAFLSGEQKKAIVDLLFK | |
| | TNRKVTVKQLKEDYFKKIECFDSVEISGVEDRFNASLGT | |
| | YHDLLKIIKDKDFLDNEENEDILEDIVLTLTLFEDREMIEE | |
| | RLKTYAHLFDDKVMKQLKRRRYTGWGRLSRKLINGIRD | |
| | KQSGKTILDFLKSDGFANRNFMQLIHDDSLTFKEDIQKAQ | |
| | VSGQGDSLHEHIANLAGSPAIKKGILQTVKVVDELVKVM | |
| | GRHKPENIVIEMARENQTTQKGQKNSRERMKRIEEGIKE | |
| | LGSQILKEHPVENTQLQNEKLYLYYLQNGRDMYVDQEL | |
| | DINRLSDYDVDHIVPQSFLKDDSIDNKVLTRSDKNRGKS | |
| | DNVPSEEVVKKMKNYWRQLLNAKLITQRKFDNLTKAER | |
| | GGLSELDKAGFIKRQLVETRQITKHVAQILDSRMNTKYD | |
| | ENDKLIREVKVITLKSKLVSDFRKDFQFYKVREINNYHH | |
| | AHAAYLNAVVGTALIKKYPKLESEFVYGDYKVYDVRK | |
| | MIAKSEQEIGKATAKYFFYSNIMNFFKTEITLANGEIRKRP | |
| | LIETNGETGEIVWDKGRDFATVRKVLSMPQVNIVKKTEV | |
| | QTGGFSKESILPKRNSDKLIARKKDWDPKKYGGFDSPTV | |
| | AYSVLVVAKVEKGKSKKLKSVKELLGITIMERSSFEKNPI | |
| | DFLEAKGYKEVKKDLIIKLPKYSLFELENGRKRMLASAG | |
| | ELQKGNELALPSKYVNFLYLASHYEKLKGSPEDNEQKQL | |
| | FVEQHKHYLDEIIEQISEFSKRVILADANLDKVLSAYNKH | |
| | RDKPIREQAENIIHLFTLTNLGAPAAFKYFDTTIDRKRYTS | |
| | TKEVLDATLIHQSITGLYETRIDLSQLGGD | |

[0386] In another embodiment, the Cas9 nickase comprises a mutation in the HNH domain which inactivates the HNH nuclease activity. For example, mutations in histidine (H) 840 or asparagine (R) 863 have been reported as loss-of-function mutations of the HNH nuclease domain and the creation of a functional Cas9 nickase (e.g., Nishimasu et al., “Crystal structure of Cas9 in complex with guide RNA and target DNA,” Cell 156(5), 935-949, which is incorporated herein by reference). Thus, nickase mutations in the HNH domain could include H840X and R863X, wherein X is any amino acid other than the wild type amino acid. In certain embodiments, the nickase could be H840A or R863A or a combination thereof.

[0387] In various embodiments, the Cas9 nickase can have a mutation in the HNH nuclease domain and have one of the following amino acid sequences, or a variant thereof having an amino acid sequence that has at least 80%, at least 85%, at least 90%, at least 95%, or at least 99% sequence identity thereto.

| Description | Sequence | SEQ ID NO: |
|---|---|---|
| Cas9 nickase | MDKKYSIGLDIGTNSVGWAVITDEYKVPSKKFKVLGNTD | SEQ ID NO: 67 |
| Streptococcus | RHSIKKNLIGALLFDSGETAEATRLKRTARRRYTRRKNRI | |
| pyogenes | CYLQEIFSNEMAKVDDSFFHRLEESFLVEEDKKHERHPIF | |
| Q99ZW2 | GNIVDEVAYHEKYPTIYHLRKKLVDSTDKADLRLIYLAL | |
| Cas9 with | AHMIKFRGHFLIEGDLNPDNSDVDKLFIQLVQTYNQLFEE | |
| H840X, | NPINASGVDAKAILSARLSKSRRLENLIAQLPGEKKNGLF | |
| wherein X is | GNLIALSLGLTPNFKSNFDLAEDAKLQLSKDTYDDDLDN | |
| any alternate | LLAQIGDQYADLFLAAKNLSDAILLSDILRVNTEITKAPLS | |
| amino acid | ASMIKRYDEHHQDLTLLKALVRQQLPEKYKEIFFDQSKN | |
| | GYAGYIDGGASQEEFYKFIKPILEKMDGTEELLVKLNRE | |
| | DLLRKQRTFDNGSIPHQIHLGELHAILRRQEDFYPFLKDN | |
| | REKIEKILTFRIPYYVGPLARGNSRFAWMTRKSEETITPW | |
| | NFEEVVDKGASAQSFIERMTNFDKNLPNEKVLPKHSLLY | |
| | EYFTVYNELTKVKYVTEGMRKPAFLSGEQKKAIVDLLFK | |
| | TNRKVTVKQLKEDYFKKIECFDSVEISGVEDRFNASLGT | |
| | YHDLLKIIKDKDFLDNEENEDILEDIVLTLTLFEDREMIEE | |
| | RLKTYAHLFDDKVMKQLKRRRYTGWGRLSRKLINGIRD | |
| | KQSGKTILDFLKSDGFANRNFMQLIHDDSLTFKEDIQKAQ | |
| | VSGQGDSLHEHIANLAGSPAIKKGILQTVKVVDELVKVM | |
| | GRHKPENIVIEMARENQTTQKGQKNSRERMKRIEEGIKE | |
| | LGSQILKEHPVENTQLQNEKLYLYYLQNGRDMYVDQEL | |
| | DINRLSDYDVDXIVPQSFLKDDSIDNKVLTRSDKNRGKS | |
| | DNVPSEEVVKKMKNYWRQLLNAKLITQRKFDNLTKAER | |
| | GGLSELDKAGFIKRQLVETRQITKHVAQILDSRMNTKYD | |
| | ENDKLIREVKVITLKSKLVSDFRKDFQFYKVREINNYHH | |
| | AHDAYLNAVVGTALIKKYPKLESEFVYGDYKVYDVRK | |
| | MIAKSEQEIGKATAKYFFYSNIMNFFKTEITLANGEIRKRP | |
| | LIETNGETGEIVWDKGRDFATVRKVLSMPQVNIVKKTEV | |
| | QTGGFSKESILPKRNSDKLIARKKDWDPKKYGGFDSPTV | |
| | AYSVLVVAKVEKGKSKKLKSVKELLGITIMERSSFEKNPI | |
| | DFLEAKGYKEVKKDLIIKLPKYSLFELENGRKRMLASAG | |
| | ELQKGNELALPSKYVNFLYLASHYEKLKGSPEDNEQKQL | |
| | FVEQHKHYLDEIIEQISEFSKRVILADANLDKVLSAYNKH | |
| | RDKPIREQAENIIHLFTLTNLGAPAAFKYFDTTIDRKRYTS | |
| | TKEVLDATLIHQSITGLYETRIDLSQLGGD | |
| Cas9 nickase | MDKKYSIGLDIGTNSVGWAVITDEYKVPSKKFKVLGNTD | SEQ ID NO: 68 |
| Streptococcus | RHSIKKNLIGALLFDSGETAEATRLKRTARRRYTRRKNRI | |
| pyogenes | CYLQEIFSNEMAKVDDSFFHRLEESFLVEEDKKHERHPIF | |
| Q99ZW2 | GNIVDEVAYHEKYPTIYHLRKKLVDSTDKADLRLIYLAL | |
| Cas9 with | AHMIKFRGHFLIEGDLNPDNSDVDKLFIQLVQTYNQLFEE | |
| H840A | NPINASGVDAKAILSARLSKSRRLENLIAQLPGEKKNGLF | |
| | GNLIALSLGLTPNFKSNFDLAEDAKLQLSKDTYDDDLDN | |
| | LLAQIGDQYADLFLAAKNLSDAILLSDILRVNTEITKAPLS | |
| | ASMIKRYDEHHQDLTLLKALVRQQLPEKYKEIFFDQSKN | |
| | GYAGYIDGGASQEEFYKFIKPILEKMDGTEELLVKLNRE | |
| | DLLRKQRTFDNGSIPHQIHLGELHAILRRQEDFYPFLKDN | |
| | REKIEKILTFRIPYYVGPLARGNSRFAWMTRKSEETITPW | |
| | NFEEVVDKGASAQSFIERMTNFDKNLPNEKVLPKHSLLY | |
| | EYFTVYNELTKVKYVTEGMRKPAFLSGEQKKAIVDLLFK | |
| | TNRKVTVKQLKEDYFKKIECFDSVEISGVEDRFNASLGT | |
| | YHDLLKIIKDKDFLDNEENEDILEDIVLTLTLFEDREMIEE | |
| | RLKTYAHLFDDKVMKQLKRRRYTGWGRLSRKLINGIRD | |
| | KQSGKTILDFLKSDGFANRNFMQLIHDDSLTFKEDIQKAQ | |
| | VSGQGDSLHEHIANLAGSPAIKKGILQTVKVVDELVKVM | |
| | GRHKPENIVIEMARENQTTQKGQKNSRERMKRIEEGIKE | |
| | LGSQILKEHPVENTQLQNEKLYLYYLQNGRDMYVDQEL | |
| | DINRLSDYDVDAIVPQSFLKDDSIDNKVLTRSDKNRGKS | |
| | DNVPSEEVVKKMKNYWRQLLNAKLITQRKFDNLTKAER | |
| | GGLSELDKAGFIKRQLVETRQITKHVAQILDSRMNTKYD | |
| | ENDKLIREVKVITLKSKLVSDFRKDFQFYKVREINNYHH | |
| | AHDAYLNAVVGTALIKKYPKLESEFVYGDYKVYDVRK | |
| | MIAKSEQEIGKATAKYFFYSNIMNFFKTEITLANGEIRKRP | |
| | LIETNGETGEIVWDKGRDFATVRKVLSMPQVNIVKKTEV | |
| | QTGGFSKESILPKRNSDKLIARKKDWDPKKYGGFDSPTV | |
| | AYSVLVVAKVEKGKSKKLKSVKELLGITIMERSSFEKNPI | |
| | DFLEAKGYKEVKKDLIIKLPKYSLFELENGRKRMLASAG | |
| | ELQKGNELALPSKYVNFLYLASHYEKLKGSPEDNEQKQL | |
| | FVEQHKHYLDEIIEQISEFSKRVILADANLDKVLSAYNKH | |
| | RDKPIREQAENIIHLFTLTNLGAPAAFKYFDTTIDRKRYTS | |
| | TKEVLDATLIHQSITGLYETRIDLSQLGGD | |
| Cas9 nickase | MDKKYSIGLDIGTNSVGWAVITDEYKVPSKKFKVLGNTD | SEQ ID NO: 69 |
| Streptococcus | RHSIKKNLIGALLFDSGETAEATRLKRTARRRYTRRKNRI | |
| pyogenes | CYLQEIFSNEMAKVDDSFFHRLEESFLVEEDKKHERHPIF | |
| Q99ZW2 | GNIVDEVAYHEKYPTIYHLRKKLVDSTDKADLRLIYLAL | |
| Cas9 with | AHMIKFRGHFLIEGDLNPDNSDVDKLFIQLVQTYNQLFEE | |
| R863X, | NPINASGVDAKAILSARLSKSRRLENLIAQLPGEKKNGLF | |
| wherein X is | GNLIALSLGLTPNFKSNFDLAEDAKLQLSKDTYDDDLDN | |
| any alternate | LLAQIGDQYADLFLAAKNLSDAILLSDILRVNTEITKAPLS | |
| amino acid | ASMIKRYDEHHQDLTLLKALVRQQLPEKYKEIFFDQSKN | |
| | GYAGYIDGGASQEEFYKFIKPILEKMDGTEELLVKLNRE | |
| | DLLRKQRTFDNGSIPHQIHLGELHAILRRQEDFYPFLKDN | |
| | REKIEKILTFRIPYYVGPLARGNSRFAWMTRKSEETITPW | |
| | NFEEVVDKGASAQSFIERMTNFDKNLPNEKVLPKHSLLY | |
| | EYFTVYNELTKVKYVTEGMRKPAFLSGEQKKAIVDLLFK | |
| | TNRKVTVKQLKEDYFKKIECFDSVEISGVEDRFNASLGT | |
| | YHDLLKIIKDKDFLDNEENEDILEDIVLTLTLFEDREMIEE | |
| | RLKTYAHLFDDKVMKQLKRRRYTGWGRLSRKLINGIRD | |
| | KQSGKTILDFLKSDGFANRNFMQLIHDDSLTFKEDIQKAQ | |
| | VSGQGDSLHEHIANLAGSPAIKKGILQTVKVVDELVKVM | |
| | GRHKPENIVIEMARENQTTQKGQKNSRERMKRIEEGIKE | |
| | LGSQILKEHPVENTQLQNEKLYLYYLQNGRDMYVDQEL | |
| | DINRLSDYDVDHIVPQSFLKDDSIDNKVLTRSDKNXGKS | |
| | DNVPSEEVVKKMKNYWRQLLNAKLITQRKFDNLTKAER | |
| | GGLSELDKAGFIKRQLVETRQITKHVAQILDSRMNTKYD | |
| | ENDKLIREVKVITLKSKLVSDFRKDFQFYKVREINNYHH | |
| | AHDAYLNAVVGTALIKKYPKLESEFVYGDYKVYDVRK | |
| | MIAKSEQEIGKATAKYFFYSNIMNFFKTEITLANGEIRKRP | |
| | LIETNGETGEIVWDKGRDFATVRKVLSMPQVNIVKKTEV | |
| | QTGGFSKESILPKRNSDKLIARKKDWDPKKYGGFDSPTV | |
| | AYSVLVVAKVEKGKSKKLKSVKELLGITIMERSSFEKNPI | |
| | DFLEAKGYKEVKKDLIIKLPKYSLFELENGRKRMLASAG | |
| | ELQKGNELALPSKYVNFLYLASHYEKLKGSPEDNEQKQL | |
| | FVEQHKHYLDEIIEQISEFSKRVILADANLDKVLSAYNKH | |
| | RDKPIREQAENIIHLFTLTNLGAPAAFKYFDTTIDRKRYTS | |
| | TKEVLDATLIHQSITGLYETRIDLSQLGGD | |
| Cas9 nickase | MDKKYSIGLDIGTNSVGWAVITDEYKVPSKKFKVLGNTD | SEQ ID NO: 70 |
| Streptococcus | RHSIKKNLIGALLFDSGETAEATRLKRTARRRYTRRKNRI | |
| pyogenes | CYLQEIFSNEMAKVDDSFFHRLEESFLVEEDKKHERHPIF | |
| Q99ZW2 | GNIVDEVAYHEKYPTIYHLRKKLVDSTDKADLRLIYLAL | |
| Cas9 with | AHMIKFRGHFLIEGDLNPDNSDVDKLFIQLVQTYNQLFEE | |
| R863A | NPINASGVDAKAILSARLSKSRRLENLIAQLPGEKKNGLF | |
| | GNLIALSLGLTPNFKSNFDLAEDAKLQLSKDTYDDDLDN | |
| | LLAQIGDQYADLFLAAKNLSDAILLSDILRVNTEITKAPLS | |
| | ASMIKRYDEHHQDLTLLKALVRQQLPEKYKEIFFDQSKN | |
| | GYAGYIDGGASQEEFYKFIKPILEKMDGTEELLVKLNRE | |
| | DLLRKQRTFDNGSIPHQIHLGELHAILRRQEDFYPFLKDN | |
| | REKIEKILTFRIPYYVGPLARGNSRFAWMTRKSEETITPW | |
| | NFEEVVDKGASAQSFIERMTNFDKNLPNEKVLPKHSLLY | |
| | EYFTVYNELTKVKYVTEGMRKPAFLSGEQKKAIVDLLFK | |
| | TNRKVTVKQLKEDYFKKIECFDSVEISGVEDRFNASLGT | |
| | YHDLLKIIKDKDFLDNEENEDILEDIVLTLTLFEDREMIEE | |
| | RLKTYAHLFDDKVMKQLKRRRYTGWGRLSRKLINGIRD | |
| | KQSGKTILDFLKSDGFANRNFMQLIHDDSLTFKEDIQKAQ | |
| | VSGQGDSLHEHIANLAGSPAIKKGILQTVKVVDELVKVM | |
| | GRHKPENIVIEMARENQTTQKGQKNSRERMKRIEEGIKE | |
| | LGSQILKEHPVENTQLQNEKLYLYYLQNGRDMYVDQEL | |
| | DINRLSDYDVDHIVPQSFLKDDSIDNKVLTRSDKNAGKS | |
| | DNVPSEEVVKKMKNYWRQLLNAKLITQRKFDNLTKAER | |
| | GGLSELDKAGFIKRQLVETRQITKHVAQILDSRMNTKYD | |
| | ENDKLIREVKVITLKSKLVSDFRKDFQFYKVREINNYHH | |
| | AHDAYLNAVVGTALIKKYPKLESEFVYGDYKVYDVRK | |
| | MIAKSEQEIGKATAKYFFYSNIMNFFKTEITLANGEIRKRP | |
| | LIETNGETGEIVWDKGRDFATVRKVLSMPQVNIVKKTEV | |
| | QTGGFSKESILPKRNSDKLIARKKDWDPKKYGGFDSPTV | |
| | AYSVLVVAKVEKGKSKKLKSVKELLGITIMERSSFEKNPI | |
| | DFLEAKGYKEVKKDLIIKLPKYSLFELENGRKRMLASAG | |
| | ELQKGNELALPSKYVNFLYLASHYEKLKGSPEDNEQKQL | |
| | FVEQHKHYLDEIIEQISEFSKRVILADANLDKVLSAYNKH | |
| | RDKPIREQAENIIHLFTLTNLGAPAAFKYFDTTIDRKRYTS | |
| | TKEVLDATLIHQSITGLYETRIDLSQLGGD | |

[0388] In some embodiments, the N-terminal methionine is removed from a Cas9 nickase, or from any Cas9 variant, ortholog, or equivalent disclosed or contemplated herein. For example, methionine-minus Cas9 nickases include the following sequences, or a variant thereof having an amino acid sequence that has at least 80%, at least 85%, at least 90%, at least 95%, or at least 99% sequence identity thereto.

| Description | Sequence | SEQ ID NO: |
|---|---|---|
| Cas9 nickase | DKKYSIGLDIGTNSVGWAVITDEYKVPSKKFKVLGNTDR | SEQ ID NO: 71 |
| (Met minus) | HSIKKNLIGALLFDSGETAEATRLKRTARRRYTRRKNRIC | |
| Streptococcus | YLQEIFSNEMAKVDDSFFHRLEESFLVEEDKKHERHPIFG | |
| pyogenes | NIVDEVAYHEKYPTIYHLRKKLVDSTDKADLRLIYLALA | |
| Q99ZW2 | HMIKFRGHFLIEGDLNPDNSDVDKLFIQLVQTYNQLFEE | |
| Cas9 with | NPINASGVDAKAILSARLSKSRRLENLIAQLPGEKKNGLF | |
| H840X, | GNLIALSLGLTPNFKSNFDLAEDAKLQLSKDTYDDDLDN | |
| wherein X is | LLAQIGDQYADLFLAAKNLSDAILLSDILRVNTEITKAPL | |
| any alternate | SASMIKRYDEHHQDLTLLKALVRQQLPEKYKEIFFDQSK | |
| amino acid | NGYAGYIDGGASQEEFYKFIKPILEKMDGTEELLVKLNR | |
| | EDLLRKQRTFDNGSIPHQIHLGELHAILRRQEDFYPFLKD | |
| | NREKIEKILTFRIPYYVGPLARGNSRFAWMTRKSEETITP | |
| | WNFEEVVDKGASAQSFIERMTNFDKNLPNEKVLPKHSL | |
| | LYEYFTVYNELTKVKYVTEGMRKPAFLSGEQKKAIVDL | |
| | LFKTNRKVTVKQLKEDYFKKIECFDSVEISGVEDRFNAS | |
| | LGTYHDLLKIIKDKDFLDNEENEDILEDIVLTLTLFEDRE | |
| | MIEERLKTYAHLFDDKVMKQLKRRRYTGWGRLSRKLIN | |
| | GIRDKQSGKTILDFLKSDGFANRNFMQLIHDDSLTFKEDI | |
| | QKAQVSGQGDSLHEHIANLAGSPAIKKGILQTVKVVDEL | |
| | VKVMGRHKPENIVIEMARENQTTQKGQKNSRERMKRIE | |
| | EGIKELGSQILKEHPVENTQLQNEKLYLYYLQNGRDMY | |
| | VDQELDINRLSDYDVDXIVPQSFLKDDSIDNKVLTRSDK | |
| | NRGKSDNVPSEEVVKKMKNYWRQLLNAKLITQRKFDN | |
| | LTKAERGGLSELDKAGFIKRQLVETRQITKHVAQILDSR | |
| | MNTKYDENDKLIREVKVITLKSKLVSDFRKDFQFYKVRE | |
| | INNYHHAHDAYLNAVVGTALIKKYPKLESEFVYGDYKV | |
| | YDVRKMIAKSEQEIGKATAKYFFYSNIMNFFKTEITLAN | |
| | GEIRKRPLIETNGETGEIVWDKGRDFATVRKVLSMPQVN | |
| | IVKKTEVQTGGFSKESILPKRNSDKLIARKKDWDPKKYG | |
| | GFDSPTVAYSVLVVAKVEKGKSKKLKSVKELLGITIMER | |
| | SSFEKNPIDFLEAKGYKEVKKDLIIKLPKYSLFELENGRK | |
| | RMLASAGELQKGNELALPSKYVNFLYLASHYEKLKGSP | |
| | EDNEQKQLFVEQHKHYLDEIIEQISEFSKRVILADANLDK | |
| | VLSAYNKHRDKPIREQAENIIHLFTLTNLGAPAAFKYFDT | |
| | TIDRKRYTSTKEVLDATLIHQSITGLYETRIDLSQLGGD | |
| Cas9 nickase | DKKYSIGLDIGTNSVGWAVITDEYKVPSKKFKVLGNTDR | SEQ ID NO: 31 |
| (Met minus) | HSIKKNLIGALLFDSGETAEATRLKRTARRRYTRRKNRIC | |
| Streptococcus | YLQEIFSNEMAKVDDSFFHRLEESFLVEEDKKHERHPIFG | |
| pyogenes | NIVDEVAYHEKYPTIYHLRKKLVDSTDKADLRLIYLALA | |
| Q99ZW2 | HMIKFRGHFLIEGDLNPDNSDVDKLFIQLVQTYNQLFEE | |
| Cas9 with | NPINASGVDAKAILSARLSKSRRLENLIAQLPGEKKNGLF | |
| H840A | GNLIALSLGLTPNFKSNFDLAEDAKLQLSKDTYDDDLDN | |
| | LLAQIGDQYADLFLAAKNLSDAILLSDILRVNTEITKAPL | |
| | SASMIKRYDEHHQDLTLLKALVRQQLPEKYKEIFFDQSK | |
| | NGYAGYIDGGASQEEFYKFIKPILEKMDGTEELLVKLNR | |
| | EDLLRKQRTFDNGSIPHQIHLGELHAILRRQEDFYPFLKD | |
| | NREKIEKILTFRIPYYVGPLARGNSRFAWMTRKSEETITP | |
| | WNFEEVVDKGASAQSFIERMTNFDKNLPNEKVLPKHSL | |
| | LYEYFTVYNELTKVKYVTEGMRKPAFLSGEQKKAIVDL | |
| | LFKTNRKVTVKQLKEDYFKKIECFDSVEISGVEDRFNAS | |
| | LGTYHDLLKIIKDKDFLDNEENEDILEDIVLTLTLFEDRE | |
| | MIEERLKTYAHLFDDKVMKQLKRRRYTGWGRLSRKLIN | |
| | GIRDKQSGKTILDFLKSDGFANRNFMQLIHDDSLTFKEDI | |
| | QKAQVSGQGDSLHEHIANLAGSPAIKKGILQTVKVVDEL | |
| | VKVMGRHKPENIVIEMARENQTTQKGQKNSRERMKRIE | |
| | EGIKELGSQILKEHPVENTQLQNEKLYLYYLQNGRDMY | |
| | VDQELDINRLSDYDVDAIVPQSFLKDDSIDNKVLTRSDK | |
| | NRGKSDNVPSEEVVKKMKNYWRQLLNAKLITQRKFDN | |
| | LTKAERGGLSELDKAGFIKRQLVETRQITKHVAQILDSR | |
| | MNTKYDENDKLIREVKVITLKSKLVSDFRKDFQFYKVRE | |
| | INNYHHAHDAYLNAVVGTALIKKYPKLESEFVYGDYKV | |
| | YDVRKMIAKSEQEIGKATAKYFFYSNIMNFFKTEITLAN | |
| | GEIRKRPLIETNGETGEIVWDKGRDFATVRKVLSMPQVN | |
| | IVKKTEVQTGGFSKESILPKRNSDKLIARKKDWDPKKYG | |
| | GFDSPTVAYSVLVVAKVEKGKSKKLKSVKELLGITIMER | |
| | SSFEKNPIDFLEAKGYKEVKKDLIIKLPKYSLFELENGRK | |
| | RMLASAGELQKGNELALPSKYVNFLYLASHYEKLKGSP | |
| | EDNEQKQLFVEQHKHYLDEIIEQISEFSKRVILADANLDK | |
| | VLSAYNKHRDKPIREQAENIIHLFTLTNLGAPAAFKYFDT | |
| | TIDRKRYTSTKEVLDATLIHQSITGLYETRIDLSQLGGD | |
| Cas9 nickase | DKKYSIGLDIGTNSVGWAVITDEYKVPSKKFKVLGNTDR | SEQ ID NO: 72 |
| (Met minus) | HSIKKNLIGALLFDSGETAEATRLKRTARRRYTRRKNRIC | |
| Streptococcus | YLQEIFSNEMAKVDDSFFHRLEESFLVEEDKKHERHPIFG | |
| pyogenes | NIVDEVAYHEKYPTIYHLRKKLVDSTDKADLRLIYLALA | |
| Q99ZW2 | HMIKFRGHFLIEGDLNPDNSDVDKLFIQLVQTYNQLFEE | |
| Cas9 with | NPINASGVDAKAILSARLSKSRRLENLIAQLPGEKKNGLF | |
| R863X, | GNLIALSLGLTPNFKSNFDLAEDAKLQLSKDTYDDDLDN | |
| wherein X is | LLAQIGDQYADLFLAAKNLSDAILLSDILRVNTEITKAPL | |
| any alternate | SASMIKRYDEHHQDLTLLKALVRQQLPEKYKEIFFDQSK | |
| amino acid | NGYAGYIDGGASQEEFYKFIKPILEKMDGTEELLVKLNR | |
| | EDLLRKQRTFDNGSIPHQIHLGELHAILRRQEDFYPFLKD | |
| | NREKIEKILTFRIPYYVGPLARGNSRFAWMTRKSEETITP | |
| | WNFEEVVDKGASAQSFIERMTNFDKNLPNEKVLPKHSL | |
| | LYEYFTVYNELTKVKYVTEGMRKPAFLSGEQKKAIVDL | |
| | LFKTNRKVTVKQLKEDYFKKIECFDSVEISGVEDRFNAS | |
| | LGTYHDLLKIIKDKDFLDNEENEDILEDIVLTLTLFEDRE | |
| | MIEERLKTYAHLFDDKVMKQLKRRRYTGWGRLSRKLIN | |
| | GIRDKQSGKTILDFLKSDGFANRNFMQLIHDDSLTFKEDI | |
| | QKAQVSGQGDSLHEHIANLAGSPAIKKGILQTVKVVDEL | |
| | VKVMGRHKPENIVIEMARENQTTQKGQKNSRERMKRIE | |
| | EGIKELGSQILKEHPVENTQLQNEKLYLYYLQNGRDMY | |
| | VDQELDINRLSDYDVDHIVPQSFLKDDSIDNKVLTRSDK | |
| | NXGKSDNVPSEEVVKKMKNYWRQLLNAKLITQRKFDN | |
| | LTKAERGGLSELDKAGFIKRQLVETRQITKHVAQILDSR | |
| | MNTKYDENDKLIREVKVITLKSKLVSDFRKDFQFYKVRE | |
| | INNYHHAHDAYLNAVVGTALIKKYPKLESEFVYGDYKV | |
| | YDVRKMIAKSEQEIGKATAKYFFYSNIMNFFKTEITLAN | |
| | GEIRKRPLIETNGETGEIVWDKGRDFATVRKVLSMPQVN | |
| | IVKKTEVQTGGFSKESILPKRNSDKLIARKKDWDPKKYG | |
| | GFDSPTVAYSVLVVAKVEKGKSKKLKSVKELLGITIMER | |
| | SSFEKNPIDFLEAKGYKEVKKDLIIKLPKYSLFELENGRK | |
| | RMLASAGELQKGNELALPSKYVNFLYLASHYEKLKGSP | |
| | EDNEQKQLFVEQHKHYLDEIIEQISEFSKRVILADANLDK | |
| | VLSAYNKHRDKPIREQAENIIHLFTLTNLGAPAAFKYFDT | |
| | TIDRKRYTSTKEVLDATLIHQSITGLYETRIDLSQLGGD | |
| Cas9 nickase | DKKYSIGLDIGTNSVGWAVITDEYKVPSKKFKVLGNTDR | SEQ ID NO: 73 |
| (Met minus) | HSIKKNLIGALLFDSGETAEATRLKRTARRRYTRRKNRIC | |
| Streptococcus | YLQEIFSNEMAKVDDSFFHRLEESFLVEEDKKHERHPIFG | |
| pyogenes | NIVDEVAYHEKYPTIYHLRKKLVDSTDKADLRLIYLALA | |
| Q99ZW2 | HMIKFRGHFLIEGDLNPDNSDVDKLFIQLVQTYNQLFEE | |
| Cas9 with | NPINASGVDAKAILSARLSKSRRLENLIAQLPGEKKNGLF | |
| R863A | GNLIALSLGLTPNFKSNFDLAEDAKLQLSKDTYDDDLDN | |
| | LLAQIGDQYADLFLAAKNLSDAILLSDILRVNTEITKAPL | |
| | SASMIKRYDEHHQDLTLLKALVRQQLPEKYKEIFFDQSK | |
| | NGYAGYIDGGASQEEFYKFIKPILEKMDGTEELLVKLNR | |
| | EDLLRKQRTFDNGSIPHQIHLGELHAILRRQEDFYPFLKD | |
| | NREKIEKILTFRIPYYVGPLARGNSRFAWMTRKSEETITP | |
| | WNFEEVVDKGASAQSFIERMTNFDKNLPNEKVLPKHSL | |
| | LYEYFTVYNELTKVKYVTEGMRKPAFLSGEQKKAIVDL | |
| | LFKTNRKVTVKQLKEDYFKKIECFDSVEISGVEDRFNAS | |
| | LGTYHDLLKIIKDKDFLDNEENEDILEDIVLTLTLFEDRE | |
| | MIEERLKTYAHLFDDKVMKQLKRRRYTGWGRLSRKLIN | |
| | GIRDKQSGKTILDFLKSDGFANRNFMQLIHDDSLTFKEDI | |
| | QKAQVSGQGDSLHEHIANLAGSPAIKKGILQTVKVVDEL | |
| | VKVMGRHKPENIVIEMARENQTTQKGQKNSRERMKRIE | |
| | EGIKELGSQILKEHPVENTQLQNEKLYLYYLQNGRDMY | |
| | VDQELDINRLSDYDVDHIVPQSFLKDDSIDNKVLTRSDK | |
| | NAGKSDNVPSEEVVKKMKNYWRQLLNAKLITQRKFDN | |
| | LTKAERGGLSELDKAGFIKRQLVETRQITKHVAQILDSR | |
| | MNTKYDENDKLIREVKVITLKSKLVSDFRKDFQFYKVRE | |
| | INNYHHAHDAYLNAVVGTALIKKYPKLESEFVYGDYKV | |
| | YDVRKMIAKSEQEIGKATAKYFFYSNIMNFFKTEITLAN | |
| | GEIRKRPLIETNGETGEIVWDKGRDFATVRKVLSMPQVN | |
| | IVKKTEVQTGGFSKESILPKRNSDKLIARKKDWDPKKYG | |
| | GFDSPTVAYSVLVVAKVEKGKSKKLKSVKELLGITIMER | |
| | SSFEKNPIDFLEAKGYKEVKKDLIIKLPKYSLFELENGRK | |
| | RMLASAGELQKGNELALPSKYVNFLYLASHYEKLKGSP | |
| | EDNEQKQLFVEQHKHYLDEIIEQISEFSKRVILADANLDK | |
| | VLSAYNKHRDKPIREQAENIIHLFTLTNLGAPAAFKYFDT | |
| | TIDRKRYTSTKEVLDATLIHQSITGLYETRIDLSQLGGD | |

### E. Other Cas9 Variants

[0389] Besides dead Cas9 and Cas9 nickase variants, the Cas9 proteins used herein may also include other “Cas9 variants” having at least about 70% identical, at least about 80% identical, at least about 90% identical, at least about 95% identical, at least about 96% identical, at least about 97% identical, at least about 98% identical, at least about 99% identical, at least about 99.5% identical, or at least about 99.9% identical to any reference Cas9 protein, including any wild type Cas9, or mutant Cas9 (e.g., a dead Cas9 or Cas9 nickase), or fragment Cas9, or circular permutant Cas9, or other variant of Cas9 disclosed herein or known in the art. In some embodiments, a Cas9 variant may have 1, 2, 3, 4, 5, 6, 7, 8, 9, 10, 11, 12, 13, 14, 15, 16, 17, 18, 19, 20, 21, 22, 21, 24, 25, 26, 27, 28, 29, 30, 31, 32, 33, 34, 35, 36, 37, 38, 39, 40, 41, 42, 43, 44, 45, 46, 47, 48, 49, 50 or more amino acid changes compared to a reference Cas9. In some embodiments, the Cas9 variant comprises a fragment of a reference Cas9 (e.g., a gRNA binding domain or a DNA-cleavage domain), such that the fragment is at least about 70% identical, at least about 80% identical, at least about 90% identical, at least about 95% identical, at least about 96% identical, at least about 97% identical, at least about 98% identical, at least about 99% identical, at least about 99.5% identical, or at least about 99.9% identical to the corresponding fragment of wild type Cas9. In some embodiments, the fragment is at least 30%, at least 35%, at least 40%, at least 45%, at least 50%, at least 55%, at least 60%, at least 65%, at least 70%, at least 75%, at least 80%, at least 85%, at least 90%, at least 95% identical, at least 96%, at least 97%, at least 98%, at least 99%, or at least 99.5% of the amino acid length of a corresponding wild type Cas9 (e.g., SEQ ID NO: 37).

[0390] In some embodiments, the disclosure also may utilize Cas9 fragments which retain their functionality and which are fragments of any herein disclosed Cas9 protein. In some embodiments, the Cas9 fragment is at least 100 amino acids in length. In some embodiments, the fragment is at least 100, 150, 200, 250, 300, 350, 400, 450, 500, 550, 600, 650, 700, 750, 800, 850, 900, 950, 1000, 1050, 1100, 1150, 1200, 1250, or at least 1300 amino acids in length.

[0391] In various embodiments, the prime editors disclosed herein may comprise one of the Cas9 variants described as follows, or a Cas9 variant thereof having at least about 70% identical, at least about 80% identical, at least about 90% identical, at least about 95% identical, at least about 96% identical, at least about 97% identical, at least about 98% identical, at least about 99% identical, at least about 99.5% identical, or at least about 99.9% identical to any reference Cas9 variants.

### F. Small-Sized Cas9 Variants

[0392] In some embodiments, the prime editors contemplated herein can include a Cas9 protein that is of smaller molecular weight than the canonical SpCas9 sequence. In some embodiments, the smaller-sized Cas9 variants may facilitate delivery to cells, e.g., by an expression vector, nanoparticle, or other means of delivery. In certain embodiments, the smaller-sized Cas9 variants can include enzymes categorized as type II enzymes of the Class 2 CRISPR-Cas systems. In some embodiments, the smaller-sized Cas9 variants can include enzymes categorized as type V enzymes of the Class 2 CRISPR-Cas systems. In other embodiments, the smaller-sized Cas9 variants can include enzymes categorized as type VI enzymes of the Class 2 CRISPR-Cas systems.

[0393] The canonical SpCas9 protein is 1368 amino acids in length and has a predicted molecular weight of 158 kilodaltons. The term “small-sized Cas9 variant”, as used herein, refers to any Cas9 variant—naturally occurring, engineered, or otherwise—that is less than at least 1300 amino acids, or at least less than 1290 amino acids, or than less than 1280 amino acids, or less than 1270 amino acid, or less than 1260 amino acid, or less than 1250 amino acids, or less than 1240 amino acids, or less than 1230 amino acids, or less than 1220 amino acids, or less than 1210 amino acids, or less than 1200 amino acids, or less than 1190 amino acids, or less than 1180 amino acids, or less than 1170 amino acids, or less than 1160 amino acids, or less than 1150 amino acids, or less than 1140 amino acids, or less than 1130 amino acids, or less than 1120 amino acids, or less than 1110 amino acids, or less than 1100 amino acids, or less than 1050 amino acids, or less than 1000 amino acids, or less than 950 amino acids, or less than 900 amino acids, or less than 850 amino acids, or less than 800 amino acids, or less than 750 amino acids, or less than 700 amino acids, or less than 650 amino acids, or less than 600 amino acids, or less than 550 amino acids, or less than 500 amino acids, but at least larger than about 400 amino acids and retaining the required functions of the Cas9 protein. The Cas9 variants can include those categorized as type II, type V, or type VI enzymes of the Class 2 CRISPR-Cas system.

[0394] In various embodiments, the prime editors disclosed herein may comprise one of the small-sized Cas9 variants described as follows, or a Cas9 variant thereof having at least about 70% identical, at least about 80% identical, at least about 90% identical, at least about 95% identical, at least about 96% identical, at least about 97% identical, at least about 98% identical, at least about 99% identical, at least about 99.5% identical, or at least about 99.9% identical to any reference small-sized Cas9 protein.

| Description | Sequence | SEQ ID NO: |
|---|---|---|
| SaCas9 | MGKRNYILGLDIGITSVGYGIIDYETRDVIDAGVRLFKEA | SEQ ID NO: |
| Staphylococcus | NVENNEGRRSKRGARRLKRRRRHRIQRVKKLLFDYNLL | 45 |
| aureus | TDHSELSGINPYEARVKGLSQKLSEEEFSAALLHLAKRRG | |
| 1053 AA | VHNVNEVEEDTGNELSTKEQISRNSKALEEKYVAELQLE | |
| 123 kDa | RLKKDGEVRGSINRFKTSDYVKEAKQLLKVQKAYHQLD | |
| | QSFIDTYIDLLETRRTYYEGPGEGSPFGWKDIKEWYEML | |
| | MGHCTYFPEELRSVKYAYNADLYNALNDLNNLVITRDE | |
| | NEKLEYYEKFQIIENVFKQKKKPTLKQIAKEILVNEEDIK | |
| | GYRVTSTGKPEFTNLKVYHDIKDITARKEIIENAELLDQIA | |
| | KILTIYQSSEDIQEELTNLNSELTQEEIEQISNLKGYTGTHN | |
| | LSLKAINLILDELWHTNDNQIAIFNRLKLVPKKVDLSQQK | |
| | EIPTTLVDDFILSPVVKRSFIQSIKVINAIIKKYGLPNDIIIEL | |
| | AREKNSKDAQKMINEMQKRNRQTNERIEEIIRTTGKENA | |
| | KYLIEKIKLHDMQEGKCLYSLEAIPLEDLLNNPFNYEVDH | |
| | IIPRSVSFDNSFNNKVLVKQEENSKKGNRTPFQYLSSSDS | |
| | KISYETFKKHILNLAKGKGRISKTKKEYLLEERDINRFSV | |
| | QKDFINRNLVDTRYATRGLMNLLRSYFRVNNLDVKVKSI | |
| | NGGFTSFLRRKWKFKKERNKGYKHHAEDALIIANADFIF | |
| | KEWKKLDKAKKVMENQMFEEKQAESMPEIETEQEYKEI | |
| | FITPHQIKHIKDFKDYKYSHRVDKKPNRKLINDTLYSTRK | |
| | DDKGNTLIVNNLNGLYDKDNDKLKKLINKSPEKLLMYH | |
| | HDPQTYQKLKLIMEQYGDEKNPLYKYYEETGNYLTKYS | |
| | KKDNGPVIKKIKYYGNKLNAHLDITDDYPNSRNKVVKLS | |
| | LKPYRFDVYLDNGVYKFVTVKNLDVIKKENYYEVNSKC | |
| | YEEAKKLKKISNQAEFIASFYKNDLIKINGELYRVIGVNN | |
| | DLLNRIEVNMIDITYREYLENMNDKRPPHIIKTIASKTQSI | |
| | KKYSTDILGNLYEVKSKKHPQIIKK | |
| NmeCas9 | MAAFKPNSINYILGLDIGIASVGWAMVEIDEEENPIRLIDL | SEQ ID NO: |
| N. | GVRVFERAEVPKTGDSLAMARRLARSVRRLTRRRAHRL | 74 |
| meningitidis | LRTRRLLKREGVLQAANFDENGLIKSLPNTPWQLRAAAL | |
| 1083 AA | DRKLTPLEWSAVLLHLIKHRGYLSQRKNEGETADKELGA | |
| 124.5 kDa | LLKGVAGNAHALQTGDFRTPAELALNKFEKESGHIRNQR | |
| | SDYSHTFSRKDLQAELILLFEKQKEFGNPHVSGGLKEGIE | |
| | TLLMTQRPALSGDAVQKMLGHCTFEPAEPKAAKNTYTA | |
| | ERFIWLTKLNNLRILEQGSERPLTDTERATLMDEPYRKSK | |
| | LTYAQARKLLGLEDTAFFKGLRYGKDNAEASTLMEMKA | |
| | YHAISRALEKEGLKDKKSPLNLSPELQDEIGTAFSLFKTD | |
| | EDITGRLKDRIQPEILEALLKHISFDKFVQISLKALRRIVPL | |
| | MEQGKRYDEACAEIYGDHYGKKNTEEKIYLPPIPADEIR | |
| | NPVVLRALSQARKVINGVVRRYGSPARIHIETAREVGKSF | |
| | KDRKEIEKRQEENRKDREKAAAKFREYFPNFVGEPKSKD | |
| | ILKLRLYEQQHGKCLYSGKEINLGRLNEKGYVEIDAALPF | |
| | SRTWDDSFNNKVLVLGSENQNKGNQTPYEYFNGKDNSR | |
| | EWQEFKARVETSRFPRSKKQRILLQKFDEDGFKERNLND | |
| | TRYVNRFLCQFVADRMRLTGKGKKRVFASNGQITNLLR | |
| | GFWGLRKVRAENDRHHALDAVVVACSTVAMQQKITRF | |
| | VRYKEMNAFDGKTIDKETGEVLHQKTHFPQPWEFFAQE | |
| | VMIRVFGKPDGKPEFEEADTLEKLRTLLAEKLSSRPEAVH | |
| | EYVTPLFVSRAPNRKMSGQGHMETVKSAKRLDEGVSVL | |
| | RVPLTQLKLKDLEKMVNREREPKLYEALKARLEAHKDD | |
| | PAKAFAEPFYKYDKAGNRTQQVKAVRVEQVQKTGVWV | |
| | RNHNGIADNATMVRVDVFEKGDKYYLVPIYSWQVAKGI | |
| | LPDRAVVQGKDEEDWQLIDDSFNFKFSLHPNDLVEVITK | |
| | KARMFGYFASCHRGTGNINIRIHDLDHKIGKNGILEGIGV | |
| | KTALSFQKYQIDELGKEIRPCRLKKRPPVR | |
| CjCas9 | MARILAFDIGISSIGWAFSENDELKDCGVRIFTKVENPKT | SEQ ID NO: |
| C. jejuni | GESLALPRRLARSARKRLARRKARLNHLKHLIANEFKLN | 75 |
| 984 AA | YEDYQSFDESLAKAYKGSLISPYELRFRALNELLSKQDFA | |
| 114.9 kDa | RVILHIAKRRGYDDIKNSDDKEKGAILKAIKQNEEKLAN | |
| | YQSVGEYLYKEYFQKFKENSKEFTNVRNKKESYERCIAQ | |
| | SFLKDELKLIFKKQREFGFSFSKKFEEEVLSVAFYKRALK | |
| | DFSHLVGNCSFFTDEKRAPKNSPLAFMFVALTRIINLLNN | |
| | LKNTEGILYTKDDLNALLNEVLKNGTLTYKQTKKLLGLS | |
| | DDYEFKGEKGTYFIEFKKYKEFIKALGEHNLSQDDLNEIA | |
| | KDITLIKDEIKLKKALAKYDLNQNQIDSLSKLEFKDHLNIS | |
| | FKALKLVTPLMLEGKKYDEACNELNLKVAINEDKKDFLP | |
| | AFNETYYKDEVTNPVVLRAIKEYRKVLNALLKKYGKVH | |
| | KINIELAREVGKNHSQRAKIEKEQNENYKAKKDAELECE | |
| | KLGLKINSKNILKLRLFKEQKEFCAYSGEKIKISDLQDEK | |
| | MLEIDHIYPYSRSFDDSYMNKVLVFTKQNQEKLNQTPFE | |
| | AFGNDSAKWQKIEVLAKNLPTKKQKRILDKNYKDKEQK | |
| | NFKDRNLNDTRYIARLVLNYTKDYLDFLPLSDDENTKLN | |
| | DTQKGSKVHVEAKSGMLTSALRHTWGFSAKDRNNHLH | |
| | HAIDAVIIAYANNSIVKAFSDFKKEQESNSAELYAKKISEL | |
| | DYKNKRKFFEPFSGFRQKVLDKIDEIFVSKPERKKPSGAL | |
| | HEETFRKEEEFYQSYGGKEGVLKALELGKIRKVNGKIVK | |
| | NGDMFRVDIFKHKKTNKFYAVPIYTMDFALKVLPNKAV | |
| | ARSKKGEIKDWILMDENYEFCFSLYKDSLILIQTKDMQEP | |
| | EFVYYNAFTSSTVSLIVSKHDNKFETLSKNQKILFKNANE | |
| | KEVIAKSIGIQNLKVFEKYIVSALGEVTKAEFRQREDFKK | |
| GeoCas9 | MRYKIGLDIGITSVGWAVMNLDIPRIEDLGVRIFDRAENP | SEQ ID NO: |
| G. | QTGESLALPRRLARSARRRLRRRKHRLERIRRLVIREGILT | 76 |
| stearothermo- | KEELDKLFEEKHEIDVWQLRVEALDRKLNNDELARVLL | |
| philus | HLAKRRGFKSNRKSERSNKENSTMLKHIEENRAILSSYRT | |
| 1087 AA | VGEMIVKDPKFALHKRNKGENYTNTIARDDLEREIRLIFS | |
| 127 kDa | KQREFGNMSCTEEFENEYITIWASQRPVASKDDIEKKVGF | |
| | CTFEPKEKRAPKATYTFQSFIAWEHINKLRLISPSGARGLT | |
| | DEERRLLYEQAFQKNKITYHDIRTLLHLPDDTYFKGIVYD | |
| | RGESRKQNENIRFLELDAYHQIRKAVDKVYGKGKSSSFL | |
| | PIDFDTFGYALTLFKDDADIHSYLRNEYEQNGKRMPNLA | |
| | NKVYDNELIEELLNLSFTKFGHLSLKALRSILPYMEQGEV | |
| | YSSACERAGYTFTGPKKKQKTMLLPNIPPIANPVVMRAL | |
| | TQARKVVNAIIKKYGSPVSIHIELARDLSQTFDERRKTKK | |
| | EQDENRKKNETAIRQLMEYGLTLNPTGHDIVKFKLWSEQ | |
| | NGRCAYSLQPIEIERLLEPGYVEVDHVIPYSRSLDDSYTN | |
| | KVLVLTRENREKGNRIPAEYLGVGTERWQQFETFVLTNK | |
| | QFSKKKRDRLLRLHYDENEETEFKNRNLNDTRYISRFFA | |
| | NFIREHLKFAESDDKQKVYTVNGRVTAHLRSRWEFNKN | |
| | REESDLHHAVDAVIVACTTPSDIAKVTAFYQRREQNKEL | |
| | AKKTEPHFPQPWPHFADELRARLSKHPKESIKALNLGNY | |
| | DDQKLESLQPVFVSRMPKRSVTGAAHQETLRRYVGIDER | |
| | SGKIQTVVKTKLSEIKLDASGHFPMYGKESDPRTYEAIRQ | |
| | RLLEHNNDPKKAFQEPLYKPKKNGEPGPVIRTVKIIDTKN | |
| | QVIPLNDGKTVAYNSNIVRVDVFEKDGKYYCVPVYTMD | |
| | IMKGILPNKAIEPNKPYSEWKEMTEDYTFRFSLYPNDLIRI | |
| | ELPREKTVKTAAGEEINVKDVFVYYKTIDSANGGLELISH | |
| | DHRFSLRGVGSRTLKRFEKYQVDVLGNIYKVRGEKRVG | |
| | LASSAHSKPGKTIRPLQSTRD | |
| LbaCas 12a | MSKLEKFTNCYSLSKTLRFKAIPVGKTQENIDNKRLLVED | SEQ ID NO: |
| L. bacterium | EKRAEDYKGVKKLLDRYYLSFINDVLHSIKLKNLNNYIS | 77 |
| 1228 AA | LFRKKTRTEKENKELENLEINLRKEIAKAFKGNEGYKSLF | |
| 143.9 kDa | KKDIIETILPEFLDDKDEIALVNSFNGFTTAFTGFFDNREN | |
| | MFSEEAKSTSIAFRCINENLTRYISNMDIFEKVDAIFDKHE | |
| | VQEIKEKILNSDYDVEDFFEGEFFNFVLTQEGIDVYNAIIG | |
| | GFVTESGEKIKGLNEYINLYNQKTKQKLPKFKPLYKQVL | |
| | SDRESLSFYGEGYTSDEEVLEVFRNTLNKNSEIFSSIKKLE | |
| | KLFKNFDEYSSAGIFVKNGPAISTISKDIFGEWNVIRDKW | |
| | NAEYDDIHLKKKAVVTEKYEDDRRKSFKKIGSFSLEQLQ | |
| | EYADADLSVVEKLKEIIIQKVDEIYKVYGSSEKLFDADFV | |
| | LEKSLKKNDAVVAIMKDLLDSVKSFENYIKAFFGEGKET | |
| | NRDESFYGDFVLAYDILLKVDHIYDAIRNYVTQKPYSKD | |
| | KFKLYFQNPQFMGGWDKDKETDYRATILRYGSKYYLAI | |
| | MDKKYAKCLQKIDKDDVNGNYEKINYKLLPGPNKMLPK | |
| | VFFSKKWMAYYNPSEDIQKIYKNGTFKKGDMFNLNDCH | |
| | KLIDFFKDSISRYPKWSNAYDFNFSETEKYKDIAGFYREV | |
| | EEQGYKVSFESASKKEVDKLVEEGKLYMFQIYNKDFSDK | |
| | SHGTPNLHTMYFKLLFDENNHGQIRLSGGAELFMRRASL | |
| | KKEELVVHPANSPIANKNPDNPKKTTTLSYDVYKDKRFS | |
| | EDQYELHIPIAINKCPKNIFKINTEVRVLLKHDDNPYVIGI | |
| | DRGERNLLYIVVVDGKGNIVEQYSLNEIINNFNGIRIKTD | |
| | YHSLLDKKEKERFEARQNWTSIENIKELKAGYISQVVHKI | |
| | CELVEKYDAVIALEDLNSGFKNSRVKVEKQVYQKFEKM | |
| | LIDKLNYMVDKKSNPCATGGALKGYQITNKFESFKSMST | |
| | QNGFIFYIPAWLTSKIDPSTGFVNLLKTKYTSIADSKKFISS | |
| | FDRIMYVPEEDLFEFALDYKNFSRTDADYIKKWKLYSYG | |
| | NRIRIFRNPKKNNVFDWEEVCLTSAYKELFNKYGINYQQ | |
| | GDIRALLCEQSDKAFYSSFMALMSLMLQMRNSITGRTDV | |
| | DFLISPVKNSDGIFYDSRNYEAQENAILPKNADANGAYNI | |
| | ARKVLWAIGQFKKAEDEKLDKVKIAISNKEWLEYAQTS | |
| | VKH | |
| BhCas12b | MATRSFILKIEPNEEVKKGLWKTHEVLNHGIAYYMNILK | SEQ ID NO: |
| B. hisashii | LIRQEAIYEHHEQDPKNPKKVSKAEIQAELWDFVLKMQK | 78 |
| 1108 AA | CNSFTHEVDKDEVFNILRELYEELVPSSVEKKGEANQLSN | |
| 130.4 kDa | KFLYPLVDPNSQSGKGTASSGRKPRWYNLKIAGDPSWEE | |
| | EKKKWEEDKKKDPLAKILGKLAEYGLIPLFIPYTDSNEPI | |
| | VKEIKWMEKSRNQSVRRLDKDMFIQALERFLSWESWNL | |
| | KVKEEYEKVEKEYKTLEERIKEDIQALKALEQYEKERQE | |
| | QLLRDTLNTNEYRLSKRGLRGWREIIQKWLKMDENEPSE | |
| | KYLEVFKDYQRKHPREAGDYSVYEFLSKKENHFIWRNH | |
| | PEYPYLYATFCEIDKKKKDAKQQATFTLADPINHPLWVR | |
| | FEERSGSNLNKYRILTEQLHTEKLKKKLTVQLDRLIYPTE | |
| | SGGWEEKGKVDIVLLPSRQFYNQIFLDIEEKGKHAFTYK | |
| | DESIKFPLKGTLGGARVQFDRDHLRRYPHKVESGNVGRI | |
| | YFNMTVNIEPTESPVSKSLKIHRDDFPKVVNFKPKELTEW | |
| | IKDSKGKKLKSGIESLEIGLRVMSIDLGQRQAAAASIFEV | |
| | VDQKPDIEGKLFFPIKGTELYAVHRASFNIKLPGETLVKS | |
| | REVLRKAREDNLKLMNQKLNFLRNVLHFQQFEDITEREK | |
| | RVTKWISRQENSDVPLVYQDELIQIRELMYKPYKDWVAF | |
| | LKQLHKRLEVEIGKEVKHWRKSLSDGRKGLYGISLKNID | |
| | EIDRTRKFLLRWSLRPTEPGEVRRLEPGQRFAIDQLNHLN | |
| | ALKEDRLKKMANTIIMHALGYCYDVRKKKWQAKNPAC | |
| | QIILFEDLSNYNPYEERSRFENSKLMKWSRREIPRQVALQ | |
| | GEIYGLQVGEVGAQFSSRFHAKTGSPGIRCSVVTKEKLQ | |
| | DNRFFKNLQREGRLTLDKIAVLKEGDLYPDKGGEKFISLS | |
| | KDRKCVTTHADINAAQNLQKRFWTRTHGFYKVYCKAY | |
| | QVDGQTVYIPESKDQKQKIIEEFGEGYFILKDGVYEWVN | |
| | AGKLKIKKGSSKQSSSELVDSDILKDSFDLASELKGEKLM | |
| | LYRDPSGNVFPSDKWMAAGVFFGKLERILISKLTNQYSIS | |
| | TIEDDSSKQSM | |

### G. Cas9 Equivalents

[0395] In some embodiments, the prime editors described herein can include any Cas9 equivalent. As used herein, the term “Cas9 equivalent” is a broad term that encompasses any napDNAbp protein that serves the same function as Cas9 in the present prime editors despite that its amino acid primary sequence and/or its three-dimensional structure may be different and/or unrelated from an evolutionary standpoint. Thus, while Cas9 equivalents include any Cas9 ortholog, homolog, mutant, or variant described or embraced herein that are evolutionarily related, the Cas9 equivalents also embrace proteins that may have evolved through convergent evolution processes to have the same or similar function as Cas9, but which do not necessarily have any similarity with regard to amino acid sequence and/or three dimensional structure. The prime editors described here embrace any Cas9 equivalent that would provide the same or similar function as Cas9 despite that the Cas9 equivalent may be based on a protein that arose through convergent evolution. For instance, if Cas9 refers to a type II enzyme of the CRISPR-Cas system, a Cas9 equivalent can refer to a type V or type VI enzyme of the CRISPR-Cas system.

[0396] For example, Cas12e (CasX) is a Cas9 equivalent that reportedly has the same function as Cas9 but which evolved through convergent evolution. Thus, the Cas12e (CasX) protein described in Liu et al., “CasX enzymes comprises a distinct family of RNA-guided genome editors,” Nature, 2019, Vol. 566: 218-223, is contemplated to be used with the prime editors described herein. In addition, any variant or modification of Cas12e (CasX) is conceivable and within the scope of the present disclosure.

[0397] Cas9 is a bacterial enzyme that evolved in a wide variety of species. However, the Cas9 equivalents contemplated herein may also be obtained from archaea, which constitute a domain and kingdom of single-celled prokaryotic microbes different from bacteria.

[0398] In some embodiments, Cas9 equivalents may refer to Cas12e (CasX) or Cas12d (CasY), which have been described in, for example, Burstein et al., “New CRISPR-Cas systems from uncultivated microbes.” Cell Res. 2017 Feb. 21. doi: 10.1038/cr.2017.21, the entire contents of which is hereby incorporated by reference. Using genome-resolved metagenomics, a number of CRISPR-Cas systems were identified, including the first reported Cas9 in the archaeal domain of life. This divergent Cas9 protein was found in little-studied nanoarchaea as part of an active CRISPR-Cas system. In bacteria, two previously unknown systems were discovered, CRISPR-Cas12e and CRISPR-Cas12d, which are among the most compact systems yet discovered. In some embodiments, Cas9 refers to Cas12e, or a variant of Cas12e. In some embodiments, Cas9 refers to a Cas12d, or a variant of Cas12d. It should be appreciated that other RNA-guided DNA binding proteins may be used as a nucleic acid programmable DNA binding protein (napDNAbp), and are within the scope of this disclosure. Also see Liu et al., “CasX enzymes comprises a distinct family of RNA-guided genome editors,” Nature, 2019, Vol. 566: 218-223. Any of these Cas9 equivalents are contemplated.

[0399] In some embodiments, the Cas9 equivalent comprises an amino acid sequence that is at least 85%, at least 90%, at least 91%, at least 92%, at least 93%, at least 94%, at least 95%, at least 96%, at least 97%, at least 98%, at least 99%, or at least 99.5% identical to a naturally-occurring Cas12e (CasX) or Cas12d (CasY) protein. In some embodiments, the napDNAbp is a naturally-occurring Cas12e (CasX) or Cas12d (CasY) protein. In some embodiments, the napDNAbp comprises an amino acid sequence that is at least 85%, at least 90%, at least 91%, at least 92%, at least 93%, at least 94%, at least 95%, at least 96%, at least 97%, at least 98%, at least 99%, or at least 99.5% identical to a wild-type Cas moiety or any Cas moiety provided herein.

[0400] In various embodiments, the nucleic acid programmable DNA binding proteins include, without limitation, Cas9 (e.g., dCas9 and nCas9), Cas12e (CasX), Cas12d (CasY), Cas12a (Cpf1), Cas12b1 (C2c1), Cas13a (C2c2), Cas12c (C2c3), Argonaute, and Cas12b1. One example of a nucleic acid programmable DNA-binding protein that has different PAM specificity than Cas9 is Clustered Regularly Interspaced Short Palindromic Repeats from Prevotella and Francisella 1 (i.e, Cas12a (Cpf1)). Similar to Cas9, Cas12a (Cpf1) is also a Class 2 CRISPR effector, but it is a member of type V subgroup of enzymes, rather than the type II subgroup. It has been shown that Cas12a (Cpf1) mediates robust DNA interference with features distinct from Cas9. Cas12a (Cpf1) is a single RNA-guided endonuclease lacking tracrRNA, and it utilizes a T-rich protospacer-adjacent motif (TTN, TTTN, or YTN). Moreover, Cpf1 cleaves DNA via a staggered DNA double-stranded break. Out of 16 Cpf1-family proteins, two enzymes from Acidaminococcus and Lachnospiraceae are shown to have efficient genome-editing activity in human cells. Cpf1 proteins are known in the art and have been described previously, for example Yamano et al., “Crystal structure of Cpf1 in complex with guide RNA and target DNA.” Cell (165) 2016, p. 949-962; the entire contents of which is hereby incorporated by reference.

[0401] In still other embodiments, the Cas protein may include any CRISPR associated protein, including but not limited to, Cas12a, Cas12b1, Cas1, Cas1B, Cas2, Cas3, Cas4, Cas5, Cas6, Cas7, Cas8, Cas9 (also known as Csn1 and Csx12), Cas10, Csy1, Csy2, Csy3, Cse1, Cse2, Csc1, Csc2, Csa5, Csn2, Csm2, Csm3, Csm4, Csm5, Csm6, Cmnr1, Cmnr3, Cmnr4, Cmnr5, Cmnr6, Csb1, Csb2, Csb3, Csx17, Csx14, Csx10, Csx16, CsaX, Csx3, Csx1, Csx15, Csf1, Csf2, Csf3, Csf4, homologs thereof, or modified versions thereof, and preferably comprising a nickase mutation (e.g., a mutation corresponding to the D10A mutation of the wild type Cas9 polypeptide of SEQ ID NO: 37).

[0402] In various other embodiments, the napDNAbp can be any of the following proteins: a Cas9, a Cas12a (Cpf1), a Cas12e (CasX), a CasL2d (CasY), a Cas2bE (C2c), a Cas13a (C2c2), a Cas12c (C2c3), a GeoCas9, a CjCas9, a Cas12g, a Cas12h, a Cas12i, a Cas13b, a Cas113c, a Cas113d, a Cas 14, a Csn2, an xCas9, an SpCas9-NG, a circularly permuted Cas9, or an Argonaute (Ago) domain, or a variant thereof.

[0403] Exemplary Cas9 equivalent protein sequences can include the following:

| Description | Sequence | SEQ ID NO: |
|---|---|---|
| AsCas12a | MTQFEGFTNLYQVSKTLRFELIPQGKTLKHIQEQGFIEEDKAR | SEQ ID NO: 79 |
| (previously | NDHYKELKPIIDRIYKTYADQCLQLVQLDWENLSAAIDSYRK | |
| known | EKTEETRNALIEEQATYRNAIHDYFIGRTDNLTDAINKRHAEI | |
| as Cpf1) | YKGLFKAELFNGKVLKQLGTVTTTEHENALLRSFDKFTTYFS | |
| Acidaminococcus | GFYENRKNVFSAEDISTAIPHRIVQDNFPKFKENCHIFTRLITA | |
| sp. | VPSLREHFENVKKAIGIFVSTSIEEVFSFPFYNQLLTQTQIDLYN | |
| (strain | QLLGGISREAGTEKIKGLNEVLNLAIQKNDETAHIIASLPHRFIP | |
| BV3L6) | LFKQILSDRNTLSFILEEFKSDEEVIQSFCKYKTLLRNENVLET | |
| UniProtK | AEALFNELNSIDLTHIFISHKKLETISSALCDHWDTLRNALYER | |
| B | RISELTGKITKSAKEKVQRSLKHEDINLQEIISAAGKELSEAFK | |
| U2UMQ6 | QKTSEILSHAHAALDQPLPTTLKKQEEKEILKSQLDSLLGLYH | |
| | LLDWFAVDESNEVDPEFSARLTGIKLEMEPSLSFYNKARNYA | |
| | TKKPYSVEKFKLNFQMPTLASGWDVNKEKNNGAILFVKNGL | |
| | YYLGIMPKQKGRYKALSFEPTEKTSEGFDKMYYDYFPDAAK | |
| | MIPKCSTQLKAVTAHFQTHTTPILLSNNFIEPLEITKEIYDLNNP | |
| | EKEPKKFQTAYAKKTGDQKGYREALCKWIDFTRDFLSKYTK | |
| | TTSIDLSSLRPSSQYKDLGEYYAELNPLLYHISFQRIAEKEIMD | |
| | AVETGKLYLFQIYNKDFAKGHHGKPNLHTLYWTGLFSPENLA | |
| | KTSIKLNGQAELFYRPKSRMKRMAHRLGEKMLNKKLKDQKT | |
| | PIPDTLYQELYDYVNHRLSHDLSDEARALLPNVITKEVSHEIIK | |
| | DRRFTSDKFFFHVPITLNYQAANSPSKFNQRVNAYLKEHPETP | |
| | IIGIDRGERNLIYITVIDSTGKILEQRSLNTIQQFDYQKKLDNRE | |
| | KERVAARQAWSVVGTIKDLKQGYLSQVIHEIVDLMIHYQAV | |
| | VVLENLNFGFKSKRTGIAEKAVYQQFEKMLIDKLNCLVLKDY | |
| | PAEKVGGVLNPYQLTDQFTSFAKMGTQSGFLFYVPAPYTSKI | |
| | DPLTGFVDPFVWKTIKNHESRKHFLEGFDFLHYDVKTGDFILH | |
| | FKMNRNLSFQRGLPGFMPAWDIVFEKNETQFDAKGTPFIAGK | |
| | RIVPVIENHRFTGRYRDLYPANELIALLEEKGIVFRDGSNILPK | |
| | LLENDDSHAIDTMVALIRSVLQMRNSNAATGEDYINSPVRDL | |
| | NGVCFDSRFQNPEWPMDADANGAYHIALKGQLLLNHLKESK | |
| | DLKLQNGISNQDWLAYIQELRN | |
| AsCas12a | MTQFEGFTNLYQVSKTLRFELIPQGKTLKHIQEQGFIEEDKAR | SEQ ID NO: 80 |
| nickase | NDHYKELKPIIDRIYKTYADQCLQLVQLDWENLSAAIDSYRK | |
| (e.g., | EKTEETRNALIEEQATYRNAIHDYFIGRTDNLTDAINKRHAEI | |
| R1226A) | YKGLFKAELFNGKVLKQLGTVTTTEHENALLRSFDKFTTYFS | |
| | GFYENRKNVFSAEDISTAIPHRIVQDNFPKFKENCHIFTRLITA | |
| | VPSLREHFENVKKAIGIFVSTSIEEVFSFPFYNQLLTQTQIDLYN | |
| | QLLGGISREAGTEKIKGLNEVLNLAIQKNDETAHIIASLPHRFIP | |
| | LFKQILSDRNTLSFILEEFKSDEEVIQSFCKYKTLLRNENVLET | |
| | AEALFNELNSIDLTHIFISHKKLETISSALCDHWDTLRNALYER | |
| | RISELTGKITKSAKEKVQRSLKHEDINLQEIISAAGKELSEAFK | |
| | QKTSEILSHAHAALDQPLPTTLKKQEEKEILKSQLDSLLGLYH | |
| | LLDWFAVDESNEVDPEFSARLTGIKLEMEPSLSFYNKARNYA | |
| | TKKPYSVEKFKLNFQMPTLASGWDVNKEKNNGAILFVKNGL | |
| | YYLGIMPKQKGRYKALSFEPTEKTSEGFDKMYYDYFPDAAK | |
| | MIPKCSTQLKAVTAHFQTHTTPILLSNNFIEPLEITKEIYDLNNP | |
| | EKEPKKFQTAYAKKTGDQKGYREALCKWIDFTRDFLSKYTK | |
| | TTSIDLSSLRPSSQYKDLGEYYAELNPLLYHISFQRIAEKEIMD | |
| | AVETGKLYLFQIYNKDFAKGHHGKPNLHTLYWTGLFSPENLA | |
| | KTSIKLNGQAELFYRPKSRMKRMAHRLGEKMLNKKLKDQKT | |
| | PIPDTLYQELYDYVNHRLSHDLSDEARALLPNVITKEVSHEIIK | |
| | DRRFTSDKFFFHVPITLNYQAANSPSKFNQRVNAYLKEHPETP | |
| | IIGIDRGERNLIYITVIDSTGKILEQRSLNTIQQFDYQKKLDNRE | |
| | KERVAARQAWSVVGTIKDLKQGYLSQVIHEIVDLMIHYQAV | |
| | VVLENLNFGFKSKRTGIAEKAVYQQFEKMLIDKLNCLVLKDY | |
| | PAEKVGGVLNPYQLTDQFTSFAKMGTQSGFLFYVPAPYTSKI | |
| | DPLTGFVDPFVWKTIKNHESRKHFLEGFDFLHYDVKTGDFILH | |
| | FKMNRNLSFQRGLPGFMPAWDIVFEKNETQFDAKGTPFIAGK | |
| | RIVPVIENHRFTGRYRDLYPANELIALLEEKGIVFRDGSNILPK | |
| | LLENDDSHAIDTMVALIRSVLQMANSNAATGEDYINSPVRDL | |
| | NGVCFDSRFQNPEWPMDADANGAYHIALKGQLLLNHLKESK | |
| | DLKLQNGISNQDWLAYIQELRN | |
| LbCas12a | MNYKTGLEDFIGKESLSKTLRNALIPTESTKIHMEEMGVIRDD | SEQ ID NO: 81 |
| (previously | ELRAEKQQELKEIMDDYYRTFIEEKLGQIQGIQWNSLFQKME | |
| known | ETMEDISVRKDLDKIQNEKRKEICCYFTSDKRFKDLFNAKLIT | |
| as Cpf1) | DILPNFIKDNKEYTEEEKAEKEQTRVLFQRFATAFTNYFNQRR | |
| Lachnospiraceae | NNFSEDNISTAISFRIVNENSEIHLQNMRAFQRIEQQYPEEVCG | |
| bacterium | MEEEYKDMLQEWQMKHIYSVDFYDRELTQPGIEYYNGICGKI | |
| GAM79 | NEHMNQFCQKNRINKNDFRMKKLHKQILCKKSSYYEIPFRFE | |
| Ref Seq. | SDQEVYDALNEFIKTMKKKEIIRRCVHLGQECDDYDLGKIYIS | |
| WP_119623382.1 | SNKYEQISNALYGSWDTIRKCIKEEYMDALPGKGEKKEEKAE | |
| | AAAKKEEYRSIADIDKIISLYGSEMDRTISAKKCITEICDMAGQ | |
| | ISIDPLVCNSDIKLLQNKEKTTEIKTILDSFLHVYQWGQTFIVSD | |
| | IIEKDSYFYSELEDVLEDFEGITTLYNHVRSYVTQKPYSTVKFK | |
| | LHFGSPTLANGWSQSKEYDNNAILLMRDQKFYLGIFNVRNKP | |
| | DKQIIKGHEKEEKGDYKKMIYNLLPGPSKMLPKVFITSRSGQE | |
| | TYKPSKHILDGYNEKRHIKSSPKFDLGYCWDLIDYYKECIHKH | |
| | PDWKNYDFHFSDTKDYEDISGFYREVEMQGYQIKWTYISADE | |
| | IQKLDEKGQIFLFQIYNKDFSVHSTGKDNLHTMYLKNLFSEEN | |
| | LKDIVLKLNGEAELFFRKASIKTPIVHKKGSVLVNRSYTQTVG | |
| | NKEIRVSIPEEYYTEIYNYLNHIGKGKLSSEAQRYLDEGKIKSF | |
| | TATKDIVKNYRYCCDHYFLHLPITINFKAKSDVAVNERTLAYI | |
| | AKKEDIHIIGIDRGERNLLYISVVDVHGNIREQRSFNIVNGYDY | |
| | QQKLKDREKSRDAARKNWEEIEKIKELKEGYLSMVIHYIAQL | |
| | VVKYNAVVAMEDLNYGFKTGRFKVERQVYQKFETMLIEKLH | |
| | YLVFKDREVCEEGGVLRGYQLTYIPESLKKVGKQCGFIFYVP | |
| | AGYTSKIDPTTGFVNLFSFKNLTNRESRQDFVGKFDEIRYDRD | |
| | KKMFEFSFDYNNYIKKGTILASTKWKVYTNGTRLKRIVVNGK | |
| | YTSQSMEVELTDAMEKMLQRAGIEYHDGKDLKGQIVEKGIE | |
| | AEIIDIFRLTVQMRNSRSESEDREYDRLISPVLNDKGEFFDTAT | |
| | ADKTLPQDADANGAYCIALKGLYEVKQIKENWKENEQFPRN | |
| | KLVQDNKTWFDFMQKKRYL | |
| PcCas12a - | MAKNFEDFKRLYSLSKTLRFEAKPIGATLDNIVKSGLLDEDEH | SEQ ID NO: 82 |
| reviously | RAASYVKVKKLIDEYHKVFIDRVLDDGCLPLENKGNNNSLAE | |
| known at | YYESYVSRAQDEDAKKKFKEIQQNLRSVIAKKLTEDKAYANL | |
| Cpf1 | FGNKLIESYKDKEDKKKIIDSDLIQFINTAESTQLDSMSQDEAK | |
| Prevotella | ELVKEFWGFVTYFYGFFDNRKNMYTAEEKSTGIAYRLVNEN | |
| copri | LPKFIDNIEAFNRAITRPEIQENMGVLYSDFSEYLNVESIQEMF | |
| Ref Seq. | QLDYYNMLLTQKQIDVYNAIIGGKTDDEHDVKIKGINEYINL | |
| WP_119227726.1 | YNQQHKDDKLPKLKALFKQILSDRNAISWLPEEFNSDQEVLN | |
| | AIKDCYERLAENVLGDKVLKSLLGSLADYSLDGIFIRNDLQLT | |
| | DISQKMFGNWGVIQNAIMQNIKRVAPARKHKESEEDYEKRIA | |
| | GIFKKADSFSISYINDCLNEADPNNAYFVENYFATFGAVNTPT | |
| | MQRENLFALVQNAYTEVAALLHSDYPTVKHLAQDKANVSKI | |
| | KALLDAIKSLQHFVKPLLGKGDESDKDERFYGELASLWAELD | |
| | TVTPLYNMIRNYMTRKPYSQKKIKLNFENPQLLGGWDANKE | |
| | KDYATIILRRNGLYYLAIMDKDSRKLLGKAMPSDGECYEKM | |
| | VYKFFKDVTTMIPKCSTQLKDVQAYFKVNTDDYVLNSKAFN | |
| | KPLTITKEVFDLNNVLYGKYKKFQKGYLTATGDNVGYTHAV | |
| | NVWIKFCMDFLNSYDSTCIYDFSSLKPESYLSLDAFYQDANLL | |
| | LYKLSFARASVSYINQLVEEGKMYLFQIYNKDFSEYSKGTPN | |
| | MHTLYWKALFDERNLADVVYKLNGQAEMFYRKKSIENTHPT | |
| | HPANHPILNKNKDNKKKESLFDYDLIKDRRYTVDKFMFHVPI | |
| | TMNFKSVGSENINQDVKAYLRHADDMHIIGIDRGERHLLYLV | |
| | VIDLQGNIKEQYSLNEIVNEYNGNTYHTNYHDLLDVREEERL | |
| | KARQSWQTIENIKELKEGYLSQVIHKITQLMVRYHAIVVLEDL | |
| | SKGFMRSRQKVEKQVYQKFEKMLIDKLNYLVDKKTDVSTPG | |
| | GLLNAYQLTCKSDSSQKLGKQSGFLFYIPAWNTSKIDPVTGFV | |
| | NLLDTHSLNSKEKIKAFFSKFDAIRYNKDKKWFEFNLDYDKF | |
| | GKKAEDTRTKWTLCTRGMRIDTFRNKEKNSQWDNQEVDLTT | |
| | EMKSLLEHYYIDIHGNLKDAISAQTDKAFFTGLLHILKLTLQM | |
| | RNSITGTETDYLVSPVADENGIFYDSRSCGNQLPENADANGA | |
| | YNIARKGLMLIEQIKNAEDLNNVKFDISNKAWLNFAQQKPYK | |
| | NG | |
| ErCas12a - | MFSAKLISDILPEFVIHNNNYSASEKEEKTQVIKLFSRFATSFK | SEQ ID NO: 83 |
| previously | DYFKNRANCFSANDISSSSCHRIVNDNAEIFFSNALVYRRIVK | |
| known at | NLSNDDINKISGDMKDSLKEMSLEEIYSYEKYGEFITQEGISFY | |
| Cpf1 | NDICGKVNLFMNLYCQKNKENKNLYKLRKLHKQILCIADTSY | |
| Eubacterium | EVPYKFESDEEVYQSVNGFLDNISSKHIVERLRKIGENYNGYN | |
| rectale | LDKIYIVSKFYESVSQKTYRDWETINTALEIHYNNILPGNGKS | |
| Ref Seq. | KADKVKKAVKNDLQKSITEINELVSNYKLCPDDNIKAETYIHE | |
| WP_119223642.1 | ISHILNNFEAQELKYNPEIHLVESELKASELKNVLDVIMNAFH | |
| | WCSVFMTEELVDKDNNFYAELEEIYDEIYPVISLYNLVRNYV | |
| | TQKPYSTKKIKLNFGIPTLADGWSKSKEYSNNAIILMRDNLYY | |
| | LGIFNAKNKPDKKIIEGNTSENKGDYKKMIYNLLPGPNKMIPK | |
| | VFLSSKTGVETYKPSAYILEGYKQNKHLKSSKDFDITFCHDLI | |
| | DYFKNCIAIHPEWKNFGFDFSDTSTYEDISGFYREVELQGYKI | |
| | DWTYISEKDIDLLQEKGQLYLFQIYNKDFSKKSSGNDNLHTM | |
| | YLKNLFSEENLKDIVLKLNGEAEIFFRKSSIKNPIIHKKGSILVN | |
| | RTYEAEEKDQFGNIQIVRKTIPENIYQELYKYFNDKSDKELSD | |
| | EAAKLKNVVGHHEAATNIVKDYRYTYDKYFLHMPITINFKA | |
| | NKTSFINDRILQYIAKEKDLHVIGIDRGERNLIYVSVIDTCGNIV | |
| | EQKSFNIVNGYDYQIKLKQQEGARQIARKEWKEIGKIKEIKEG | |
| | YLSLVIHEISKMVIKYNAIIAMEDLSYGFKKGRFKVERQVYQK | |
| | FETMLINKLNYLVFKDISITENGGLLKGYQLTYIPDKLKNVGH | |
| | QCGCIFYVPAAYTSKIDPTTGFVNIFKFKDLTVDAKREFIKKFD | |
| | SIRYDSDKNLFCFTFDYNNFITQNTVMSKSSWSVYTYGVRIKR | |
| | RFVNGRFSNESDTIDITKDMEKTLEMTDINWRDGHDLRQDIID | |
| | YEIVQHIFEIFKLTVQMRNSLSELEDRDYDRLISPVLNENNIFY | |
| | DSAKAGDALPKDADANGAYCIALKGLYEIKQITENWKEDGK | |
| | FSRDKLKISNKDWFDFIQNKRYL | |
| CsCas12a | MNYKTGLEDFIGKESLSKTLRNALIPTESTKIHMEEMGVIRDD | SEQ ID NO: 84 |
| previously | ELRAEKQQELKEIMDDYYRAFIEEKLGQIQGIQWNSLFQKME | |
| known at | ETMEDISVRKDLDKIQNEKRKEICCYFTSDKRFKDLFNAKLIT | |
| Cpf1 | DILPNFIKDNKEYTEEEKAEKEQTRVLFQRFATAFTNYFNQRR | |
| Clostridium | NNFSEDNISTAISFRIVNENSEIHLQNMRAFQRIEQQYPEEVCG | |
| sp. | MEEEYKDMLQEWQMKHIYLVDFYDRVLTQPGIEYYNGICGK | |
| AF34- | INEHMNQFCQKNRINKNDFRMKKLHKQILCKKSSYYEIPFRFE | |
| 10BH | SDQEVYDALNEFIKTMKEKEIICRCVHLGQKCDDYDLGKIYIS | |
| Ref Seq. | SNKYEQISNALYGSWDTIRKCIKEEYMDALPGKGEKKEEKAE | |
| WP_118538418.1 | AAAKKEEYRSIADIDKIISLYGSEMDRTISAKKCITEICDMAGQ | |
| | ISTDPLVCNSDIKLLQNKEKTTEIKTILDSFLHVYQWGQTFIVS | |
| | DIIEKDSYFYSELEDVLEDFEGITTLYNHVRSYVTQKPYSTVKF | |
| | KLHFGSPTLANGWSQSKEYDNNAILLMRDQKFYLGIFNVRNK | |
| | PDKQIIKGHEKEEKGDYKKMIYNLLPGPSKMLPKVFITSRSGQ | |
| | ETYKPSKHILDGYNEKRHIKSSPKFDLGYCWDLIDYYKECIHK | |
| | HPDWKNYDFHFSDTKDYEDISGFYREVEMQGYQIKWTYISA | |
| | DEIQKLDEKGQIFLFQIYNKDFSVHSTGKDNLHTMYLKNLFSE | |
| | ENLKDIVLKLNGEAELFFRKASIKTPVVHKKGSVLVNRSYTQT | |
| | VGDKEIRVSIPEEYYTEIYNYLNHIGRGKLSTEAQRYLEERKIK | |
| | SFTATKDIVKNYRYCCDHYFLHLPITINFKAKSDIAVNERTLA | |
| | YIAKKEDIHIIGIDRGERNLLYISVVDVHGNIREQRSFNIVNGY | |
| | DYQQKLKDREKSRDAARKNWEEIEKIKELKEGYLSMVIHYIA | |
| | QLVVKYNAVVAMEDLNYGFKTGRFKVERQVYQKFETMLIEK | |
| | LHYLVFKDREVCEEGGVLRGYQLTYIPESLKKVGKQCGFIFY | |
| | VPAGYTSKIDPTTGFVNLFSFKNLTNRESRQDFVGKFDEIRYD | |
| | RDKKMFEFSFDYNNYIKKGTMLASTKWKVYTNGTRLKRIVV | |
| | NGKYTSQSMEVELTDAMEKMLQRAGIEYHDGKDLKGQIVEK | |
| | GIEAEIIDIFRLTVQMRNSRSESEDREYDRLISPVLNDKGEFFDT | |
| | ATADKTLPQDADANGAYCIALKGLYEVKQIKENWKENEQFP | |
| | RNKLVQDNKTWFDFMQKKRYL | |
| BhCas12b | MATRSFILKIEPNEEVKKGLWKTHEVLNHGIAYYMNILKLIRQ | SEQ ID NO: 78 |
| Bacillus | EAIYEHHEQDPKNPKKVSKAEIQAELWDFVLKMQKCNSFTHE | |
| hisashii | VDKDEVFNILRELYEELVPSSVEKKGEANQLSNKFLYPLVDPN | |
| Ref Seq. | SQSGKGTASSGRKPRWYNLKIAGDPSWEEEKKKWEEDKKKD | |
| WP_095142515.1 | PLAKILGKLAEYGLIPLFIPYTDSNEPIVKEIKWMEKSRNQSVR | |
| | RLDKDMFIQALERFLSWESWNLKVKEEYEKVEKEYKTLEERI | |
| | KEDIQALKALEQYEKERQEQLLRDTLNTNEYRLSKRGLRGW | |
| | REIIQKWLKMDENEPSEKYLEVFKDYQRKHPREAGDYSVYEF | |
| | LSKKENHFIWRNHPEYPYLYATFCEIDKKKKDAKQQATFTLA | |
| | DPINHPLWVRFEERSGSNLNKYRILTEQLHTEKLKKKLTVQLD | |
| | RLIYPTESGGWEEKGKVDIVLLPSRQFYNQIFLDIEEKGKHAFT | |
| | YKDESIKFPLKGTLGGARVQFDRDHLRRYPHKVESGNVGRIY | |
| | FNMTVNIEPTESPVSKSLKIHRDDFPKVVNFKPKELTEWIKDS | |
| | KGKKLKSGIESLEIGLRVMSIDLGQRQAAAASIFEVVDQKPDI | |
| | EGKLFFPIKGTELYAVHRASFNIKLPGETLVKSREVLRKARED | |
| | NLKLMNQKLNFLRNVLHFQQFEDITEREKRVTKWISRQENSD | |
| | VPLVYQDELIQIRELMYKPYKDWVAFLKQLHKRLEVEIGKEV | |
| | KHWRKSLSDGRKGLYGISLKNIDEIDRTRKFLLRWSLRPTEPG | |
| | EVRRLEPGQRFAIDQLNHLNALKEDRLKKMANTIIMHALGYC | |
| | YDVRKKKWQAKNPACQIILFEDLSNYNPYEERSRFENSKLMK | |
| | WSRREIPRQVALQGEIYGLQVGEVGAQFSSRFHAKTGSPGIRC | |
| | SVVTKEKLQDNRFFKNLQREGRLTLDKIAVLKEGDLYPDKGG | |
| | EKFISLSKDRKCVTTHADINAAQNLQKRFWTRTHGFYKVYCK | |
| | AYQVDGQTVYIPESKDQKQKIIEEFGEGYFILKDGVYEWVNA | |
| | GKLKIKKGSSKQSSSELVDSDILKDSFDLASELKGEKLMLYRD | |
| | PSGNVFPSDKWMAAGVFFGKLERILISKLTNQYSISTIEDDSSK | |
| | QSM | |
| ThCas12b | MSEKTTQRAYTLRLNRASGECAVCQNNSCDCWHDALWATH | SEQ ID NO: 85 |
| Thermomonas | KAVNRGAKAFGDWLLTLRGGLCHTLVEMEVPAKGNNPPQRP | |
| hydrothermalis | TDQERRDRRVLLALSWLSVEDEHGAPKEFIVATGRDSADDRA | |
| Ref Seq. | KKVEEKLREILEKRDFQEHEIDAWLQDCGPSLKAHIREDAVW | |
| WP_072754838 | VNRRALFDAAVERIKTLTWEEAWDFLEPFFGTQYFAGIGDGK | |
| | DKDDAEGPARQGEKAKDLVQKAGQWLSARFGIGTGADFMS | |
| | MAEAYEKIAKWASQAQNGDNGKATIEKLACALRPSEPPTLDT | |
| | VLKCISGPGHKSATREYLKTLDKKSTVTQEDLNQLRKLADED | |
| | ARNCRKKVGKKGKKPWADEVLKDVENSCELTYLQDNSPAR | |
| | HREFSVMLDHAARRVSMAHSWIKKAEQRRRQFESDAQKLKN | |
| | LQERAPSAVEWLDRFCESRSMTTGANTGSGYRIRKRAIEGWS | |
| | YVVQAWAEASCDTEDKRIAAARKVQADPEIEKFGDIQLFEAL | |
| | AADEAICVWRDQEGTQNPSILIDYVTGKTAEHNQKRFKVPAY | |
| | RHPDELRHPVFCDFGNSRWSIQFAIHKEIRDRDKGAKQDTRQ | |
| | LQNRHGLKMRLWNGRSMTDVNLHWSSKRLTADLALDQNPN | |
| | PNPTEVTRADRLGRAASSAFDHVKIKNVFNEKEWNGRLQAPR | |
| | AELDRIAKLEEQGKTEQAEKLRKRLRWYVSFSPCLSPSGPFIV | |
| | YAGQHNIQPKRSGQYAPHAQANKGRARLAQLILSRLPDLRILS | |
| | VDLGHRFAAACAVWETLSSDAFRREIQGLNVLAGGSGEGDLF | |
| | LHVEMTGDDGKRRTVVYRRIGPDQLLDNTPHPAPWARLDRQ | |
| | FLIKLQGEDEGVREASNEELWTVHKLEVEVGRTVPLIDRMVR | |
| | SGFGKTEKQKERLKKLRELGWISAMPNEPSAETDEKEGEIRSI | |
| | SRSVDELMSSALGTLRLALKRHGNRARIAFAMTADYKPMPG | |
| | GQKYYFHEAKEASKNDDETKRRDNQIEFLQDALSLWHDLFSS | |
| | PDWEDNEAKKLWQNHIATLPNYQTPEEISAELKRVERNKKRK | |
| | ENRDKLRTAAKALAENDQLRQHLHDTWKERWESDDQQWKE | |
| | RLRSLKDWIFPRGKAEDNPSIRHVGGLSITRINTISGLYQILKAF | |
| | KMRPEPDDLRKNIPQKGDDELENFNRRLLEARDRLREQRVKQ | |
| | LASRIIEAALGVGRIKIPKNGKLPKRPRTTVDTPCHAVVIESLK | |
| | TYRPDDLRTRRENRQLMQWSSAKVRKYLKEGCELYGLHFLE | |
| | VPANYTSRQCSRTGLPGIRCDDVPTGDFLKAPWWRRAINTAR | |
| | EKNGGDAKDRFLVDLYDHLNNLQSKGEALPATVRVPRQGGN | |
| | LFIAGAQLDDTNKERRAIQADLNAAANIGLRALLDPDWRGR | |
| | WWYVPCKDGTSEPALDRIEGSTAFNDVRSLPTGDNSSRRAPR | |
| | EIENLWRDPSGDSLESGTWSPTRAYWDTVQSRVIELLRRHAG | |
| | LPTS | |
| LsCas12b | MSIRSFKLKLKTKSGVNAEQLRRGLWRTHQLINDGIAYYMN | SEQ ID NO: 86 |
| Laceyella | WLVLLRQEDLFIRNKETNEIEKRSKEEIQAVLLERVHKQQQRN | |
| sacchari | QWSGEVDEQTLLQALRQLYEEIVPSVIGKSGNASLKARFFLGP | |
| WP_132221894.1 | LVDPNNKTTKDVSKSGPTPKWKKMKDAGDPNWVQEYEKY | |
| | MAERQTLVRLEEMGLIPLFPMYTDEVGDIHWLPQASGYTRT | |
| | WDRDMFQQAIERLLSWESWNRRVRERRAQFEKKTHDFASRF | |
| | SESDVQWMNKLREYEAQQEKSLEENAFAPNEPYALTKKALR | |
| | GWERVYHSWMRLDSAASEEAYWQEVATCQTAMRGEFGDPA | |
| | IYQFLAQKENHDIWRGYPERVIDFAELNHLQRELRRAKEDAT | |
| | FTLPDSVDHPLWVRYEAPGGTNIHGYDLVQDTKRNLTLILDK | |
| | FILPDENGSWHEVKKVPFSLAKSKQFHRQVWLQEEQKQKKR | |
| | EVVFYDYSTNLPHLGTLAGAKLQWDRNFLNKRTQQQIEETGE | |
| | IGKVFFNISVDVRPAVEVKNGRLQNGLGKALTVLTHPDGTKI | |
| | VTGWKAEQLEKWVGESGRVSSLGLDSLSEGLRVMSIDLGQR | |
| | TSATVSVFEITKEAPDNPYKFFYQLEGTEMFAVHQRSFLLALP | |
| | GENPPQKIKQMREIRWKERNRIKQQVDQLSAILRLHKKVNED | |
| | ERIQAIDKLLQKVASWQLNEEIATAWNQALSQLYSKAKENDL | |
| | QWNQAIKNAHHQLEPVVGKQISLWRKDLSTGRQGIAGLSLW | |
| | SIEELEATKKLLTRWSKRSREPGVVKRIERFETFAKQIQHHINQ | |
| | VKENRLKQLANLIVMTALGYKYDQEQKKWIEVYPACQVVLF | |
| | ENLRSYRFSFERSRRENKKLMEWSHRSIPKLVQMQGELFGLQ | |
| | VADVYAAYSSRYHGRTGAPGIRCHALTEADLRNETNIIHELIE | |
| | AGFIKEEHRPYLQQGDLVPWSGGELFATLQKPYDNPRILTLH | |
| | ADINAAQNIQKRFWHPSMWFRVNCESVMEGEIVTYVPKNKT | |
| | VHKKQGKTFRFVKVEGSDVYEWAKWSKNRNKNTFSSITERK | |
| | PPSSMILFRDPSGTFFKEQEWVEQKTFWGKVQSMIQAYMKKT | |
| | IVQRMEE | |
| DtCas12b | MVLGRKDDTAELRRALWTTHEHVNLAVAEVERVLLRCRGRS | SEQ ID NO: 87 |
| Dsulfonatronum | YWTLDRRGDPVHVPESQVAEDALAMAREAQRRNGWPVVGE | |
| thiodismutans | DEEILLALRYLYEQIVPSCLLDDLGKPLKGDAQKIGTNYAGPL | |
| WP_031386437 | FDSDTCRRDEGKDVACCGPFHEVAGKYLGALPEWATPISKQE | |
| | FDGKDASHLRFKATGGDDAFFRVSIEKANAWYEDPANQDAL | |
| | KNKAYNKDDWKKEKDKGISSWAVKYIQKQLQLGQDPRTEV | |
| | RRKLWLELGLLPLFIPVFDKTMVGNLWNRLAVRLALAHLLS | |
| | WESWNHRAVQDQALARAKRDELAALFLGMEDGFAGLREYE | |
| | LRRNESIKQHAFEPVDRPYVVSGRALRSWTRVREEWLRHGDT | |
| | QESRKNICNRLQDRLRGKFGDPDVFHWLAEDGQEALWKERD | |
| | CVTSFSLLNDADGLLEKRKGYALMTFADARLHPRWAMYEAP | |
| | GGSNLRTYQIRKTENGLWADVVLLSPRNESAAVEEKTFNVRL | |
| | APSGQLSNVSFDQIQKGSKMVGRCRYQSANQQFEGLLGGAEI | |
| | LFDRKRIANEQHGATDLASKPGHVWFKLTLDVRPQAPQGWL | |
| | DGKGRPALPPEAKHFKTALSNKSKFADQVRPGLRVLSVDLGV | |
| | RSFAACSVFELVRGGPDQGTYFPAADGRTVDDPEKLWAKHE | |
| | RSFKITLPGENPSRKEEIARRAAMEELRSLNGDIRRLKAILRLS | |
| | VLQEDDPRTEHLRLFMEAIVDDPAKSALNAELFKGFGDDRFR | |
| | STPDLWKQHCHFFHDKAEKVVAERFSRWRTETRPKSSSWQD | |
| | WRERRGYAGGKSYWAVTYLEAVRGLILRWNMRGRTYGEVN | |
| | RQDKKQFGTVASALLHHINQLKEDRIKTGADMIIQAARGFVP | |
| | RKNGAGWVQVHEPCRLILFEDLARYRFRTDRSRRENSRLMR | |
| | WSHREIVNEVGMQGELYGLHVDTTEAGFSSRYLASSGAPGV | |
| | RCRHLVEEDFHDGLPGMHLVGELDWLLPKDKDRTANEARRL | |
| | LGGMVRPGMLVPWDGGELFATLNAASQLHVIHADINAAQNL | |
| | QRRFWGRCGEAIRIVCNQLSVDGSTRYEMAKAPKARLLGAL | |
| | QQLKNGDAPFHLTSIPNSQKPENSYVMTPTNAGKKYRAGPGE | |
| | KSSGEEDELALDIVEQAEELAQGRKTFFRDPSGVFFAPDRWLP | |
| | SEIYWSRIRRRIWQVTLERNSSGRQERAEMDEMPY | |

[0404] The prime editors described herein may also comprise Cas12a (Cpf1) (dCpf1) variants that may be used as a guide nucleotide sequence-programmable DNA-binding protein domain. The Cas12a (Cpf1) protein has a RuvC-like endonuclease domain that is similar to the RuvC domain of Cas9 but does not have a HNH endonuclease domain, and the N-terminal of Cas12a (Cpf1) does not have the alfa-helical recognition lobe of Cas9. It was shown in Zetsche et al., Cell, 163, 759-771, 2015 (which is incorporated herein by reference) that, the RuvC-like domain of Cas12a (Cpf1) is responsible for cleaving both DNA strands and inactivation of the RuvC-like domain inactivates Cas12a (Cpf1) nuclease activity.

[0405] In some embodiments, the napDNAbp is a single effector of a microbial CRISPR-Cas system. Single effectors of microbial CRISPR-Cas systems include, without limitation, Cas9, Cas12a (Cpf1), Cas12b1 (C2c1), Cas13a (C2c2), and Cas12c (C2c3). Typically, microbial CRISPR-Cas systems are divided into Class 1 and Class 2 systems. Class 1 systems have multisubunit effector complexes, while Class 2 systems have a single protein effector. For example, Cas9 and Cas12a (Cpf1) are Class 2 effectors. In addition to Cas9 and Cas12a (Cpf1), three distinct Class 2 CRISPR-Cas systems (Cas12b1, Cas13a, and Cas12c) have been described by Shmakov et al., “Discovery and Functional Characterization of Diverse Class 2 CRISPR Cas Systems”, Mol. Cell, 2015 Nov. 5; 60(3): 385-397, the entire contents of which are hereby incorporated by reference.

[0406] Effectors of two of the systems, Cas12b1 and Cas12c, contain RuvC-like endonuclease domains related to Cas12a. A third system, Cas13a contains an effector with two predicted HEPN RNase domains. Production of mature CRISPR RNA is tracrRNA-independent, unlike production of CRISPR RNA by Cas12b1. Cas12b1 depends on both CRISPR RNA and tracrRNA for DNA cleavage. Bacterial Cas13a has been shown to possess a unique RNase activity for CRISPR RNA maturation distinct from its RNA-activated single-stranded RNA degradation activity. These RNase functions are different from each other and from the CRISPR RNA-processing behavior of Cas12a. See, e.g., East-Seletsky, et al., “Two distinct RNase activities of CRISPR-Cas13a enable guide-RNA processing and RNA detection”, Nature, 2016 Oct. 13; 538(7624):270-273, the entire contents of which are hereby incorporated by reference. In vitro biochemical analysis of Cas13a in Leptotrichia shahii has shown that Cas13a is guided by a single CRISPR RNA and can be programed to cleave ssRNA targets carrying complementary protospacers. Catalytic residues in the two conserved HEPN domains mediate cleavage. Mutations in the catalytic residues generate catalytically inactive RNA-binding proteins. See e.g., Abudayyeh et al., “C2c2 is a single-component programmable RNA-guided RNA-targeting CRISPR effector”, Science, 2016 Aug. 5; 353(6299), the entire contents of which are hereby incorporated by reference.

[0407] The crystal structure of Alicyclobaccillus acidoterrastris Cas12b1 (AacC2c1) has been reported in complex with a chimeric single-molecule guide RNA (sgRNA). See e.g., Liu et al., “C2c1-sgRNA Complex Structure Reveals RNA-Guided DNA Cleavage Mechanism”, Mol. Cell, 2017 Jan. 19; 65(2):310-322, the entire contents of which are hereby incorporated by reference. The crystal structure has also been reported in Alicyclobacillus acidoterrestris C2c1 bound to target DNAs as ternary complexes. See e.g., Yang et al., “PAM-dependent Target DNA Recognition and Cleavage by C2C1 CRISPR-Cas endonuclease”, Cell, 2016 Dec. 15; 167(7):1814-1828, the entire contents of which are hereby incorporated by reference. Catalytically competent conformations of AacC2c1, both with target and non-target DNA strands, have been captured independently positioned within a single RuvC catalytic pocket, with C2c1-mediated cleavage resulting in a staggered seven-nucleotide break of target DNA. Structural comparisons between C2c1 ternary complexes and previously identified Cas9 and Cpf1 counterparts demonstrate the diversity of mechanisms used by CRISPR-Cas9 systems.

[0408] In some embodiments, the napDNAbp may be a C2c1, a C2c2, or a C2c3 protein. In some embodiments, the napDNAbp is a C2c1 protein. In some embodiments, the napDNAbp is a Cas13a protein. In some embodiments, the napDNAbp is a Cas12c protein. In some embodiments, the napDNAbp comprises an amino acid sequence that is at least 85%, at least 90%, at least 91%, at least 92%, at least 93%, at least 94%, at least 95%, at least 96%, at least 97%, at least 98%, at least 99%, or at least 99.5% identical to a naturally-occurring Cas12b1 (C2c1), Cas13a (C2c2), or Cas12c (C2c3) protein. In some embodiments, the napDNAbp is a naturally-occurring Cas12b1 (C2c1), Cas13a (C2c2), or Cas12c (C2c3) protein.

### H. Cas9 Circular Permutants

[0409] In various embodiments, the prime editors disclosed herein may comprise a circular permutant of Cas9.

[0410] The term “circularly permuted Cas9” or “circular permutant” of Cas9 or “CP-Cas9”) refers to any Cas9 protein, or variant thereof, that occurs or has been modify to engineered as a circular permutant variant, which means the N-terminus and the C-terminus of a Cas9 protein (e.g., a wild type Cas9 protein) have been topically rearranged. Such circularly permuted Cas9 proteins, or variants thereof, retain the ability to bind DNA when complexed with a guide RNA (gRNA). See, Oakes et al., “Protein Engineering of Cas9 for enhanced function,” Methods Enzymol, 2014, 546: 491-511 and Oakes et al., “CRISPR-Cas9 Circular Permutants as Programmable Scaffolds for Genome Modification,” Cell, Jan. 10, 2019, 176: 254-267, each of are incorporated herein by reference. The instant disclosure contemplates any previously known CP-Cas9 or use a new CP-Cas9 so long as the resulting circularly permuted protein retains the ability to bind DNA when complexed with a guide RNA (gRNA).

[0411] Any of the Cas9 proteins described herein, including any variant, ortholog, or naturally occurring Cas9 or equivalent thereof, may be reconfigured as a circular permutant variant.

[0412] In various embodiments, the circular permutants of Cas9 may have the following structure: N-terminus-[original C-terminus]-[optional linker]-[original N-terminus]-C-terminus.

[0413] As an example, the present disclosure contemplates the following circular permutants of canonical S. pyogenes Cas9 (1368 amino acids of UniProtKB—Q99ZW2 (CAS9_STRP1) (numbering is based on the amino acid position in SEQ ID NO: 37)):
[0414] N-terminus-[1268-1368]-[optional linker]-[1-1267]-C-terminus;
[0415] N-terminus-[1168-1368]-[optional linker]-[1-1167]-C-terminus;
[0416] N-terminus-[1068-1368]-[optional linker]-[1-1067]-C-terminus;
[0417] N-terminus-[968-1368]-[optional linker]-[1-967]-C-terminus;
[0418] N-terminus-[868-1368]-[optional linker]-[1-867]-C-terminus;
[0419] N-terminus-[768-1368]-[optional linker]-[1-767]-C-terminus;
[0420] N-terminus-[668-1368]-[optional linker]-[1-667]-C-terminus;
[0421] N-terminus-[568-1368]-[optional linker]-[1-567]-C-terminus;
[0422] N-terminus-[468-1368]-[optional linker]-[1-467]-C-terminus;
[0423] N-terminus-[368-1368]-[optional linker]-[1-367]-C-terminus;
[0424] N-terminus-[268-1368]-[optional linker]-[1-267]-C-terminus;
[0425] N-terminus-[168-1368]-[optional linker]-[1-167]-C-terminus;
[0426] N-terminus-[68-1368]-[optional linker]-[1-67]-C-terminus; or
[0427] N-terminus-[10-1368]-[optional linker]-[1-9]-C-terminus, or the corresponding circular permutants of other Cas9 proteins (including other Cas9 orthologs, variants, etc).

[0428] In particular embodiments, the circular permutant Cas9 has the following structure (based on S. pyogenes Cas9 (1368 amino acids of UniProtKB—Q99ZW2 (CAS9_STRP1) (numbering is based on the amino acid position in SEQ ID NO: 37):
[0429] N-terminus-[102-1368]-[optional linker]-[1-101]-C-terminus;
[0430] N-terminus-[1028-1368]-[optional linker]-[1-1027]-C-terminus;
[0431] N-terminus-[1041-1368]-[optional linker]-[1-1043]-C-terminus;
[0432] N-terminus-[1249-1368]-[optional linker]-[1-1248]-C-terminus; or
[0433] N-terminus-[1300-1368]-[optional linker]-[1-1299]-C-terminus, or the corresponding circular permutants of other Cas9 proteins (including other Cas9 orthologs, variants, etc).

[0434] In still other embodiments, the circular permutant Cas9 has the following structure (based on S. pyogenes Cas9 (1368 amino acids of UniProtKB—Q99ZW2 (CAS9_STRP1) (numbering is based on the amino acid position in SEQ ID NO: 37):
[0435] N-terminus-[103-1368]-[optional linker]-[1-102]-C-terminus;
[0436] N-terminus-[1029-1368]-[optional linker]-[1-1028]-C-terminus;
[0437] N-terminus-[1042-1368]-[optional linker]-[1-1041]-C-terminus;
[0438] N-terminus-[1250-1368]-[optional linker]-[1-1249]-C-terminus; or
[0439] N-terminus-[1301-1368]-[optional linker]-[1-1300]-C-terminus, or the corresponding circular permutants of other Cas9 proteins (including other Cas9 orthologs, variants, etc).

[0440] In some embodiments, the circular permutant can be formed by linking a C-terminal fragment of a Cas9 to an N-terminal fragment of a Cas9, either directly or by using a linker, such as an amino acid linker. In some embodiments, The C-terminal fragment may correspond to the C-terminal 95% or more of the amino acids of a Cas9 (e.g., amino acids about 1300-1368), or the C-terminal 90%, 85%, 80%, 75%, 70%, 65%, 60%, 55%, 50%, 45%, 40%, 35%, 30%, 25%, 20%, 15%, 10%, or 5% or more of a Cas9 (e.g., any one of SEQ ID NOs: 88-97). The N-terminal portion may correspond to the N-terminal 95% or more of the amino acids of a Cas9 (e.g., amino acids about 1-1300), or the N-terminal 90%, 85%, 80%, 75%, 70%, 65%, 60%, 55%, 50%, 45%, 40%, 35%, 30%, 25%, 20%, 15%, 10%, or 5% or more of a Cas9 (e.g., of SEQ ID NO: 37).

[0441] In some embodiments, the circular permutant can be formed by linking a C-terminal fragment of a Cas9 to an N-terminal fragment of a Cas9, either directly or by using a linker, such as an amino acid linker. In some embodiments, the C-terminal fragment that is rearranged to the N-terminus, includes or corresponds to the C-terminal 30% or less of the amino acids of a Cas9 (e.g., amino acids 1012-1368 of SEQ ID NO: 37). In some embodiments, the C-terminal fragment that is rearranged to the N-terminus, includes or corresponds to the C-terminal 30%, 29%, 28%, 27%, 26%, 25%, 24%, 23%, 22%, 21%, 20%, 19%, 18%, 17%, 16%, 15%, 14%, 13%, 12%, 11%, 10%, 9%, 8%, 7%, 6%, 5%, 4%, 3%, 2%, or 1% of the amino acids of a Cas9 (e.g., the Cas9 of SEQ ID NO: 37). In some embodiments, the C-terminal fragment that is rearranged to the N-terminus, includes or corresponds to the C-terminal 410 residues or less of a Cas9 (e.g., the Cas9 of SEQ ID NO: 37). In some embodiments, the C-terminal portion that is rearranged to the N-terminus, includes or corresponds to the C-terminal 410, 400, 390, 380, 370, 360, 350, 340, 330, 320, 310, 300, 290, 280, 270, 260, 250, 240, 230, 220, 210, 200, 190, 180, 170, 160, 150, 140, 130, 120, 110, 100, 90, 80, 70, 60, 50, 40, 30, 20, or 10 residues of a Cas9 (e.g., the Cas9 of SEQ ID NO: 37). In some embodiments, the C-terminal portion that is rearranged to the N-terminus, includes or corresponds to the C-terminal 357, 341, 328, 120, or 69 residues of a Cas9 (e.g., the Cas9 of SEQ ID NO: 37).

[0442] In other embodiments, circular permutant Cas9 variants may be defined as a topological rearrangement of a Cas9 primary structure based on the following method, which is based on S. pyogenes Cas9 of SEQ ID NO: 37: (a) selecting a circular permutant (CP) site corresponding to an internal amino acid residue of the Cas9 primary structure, which dissects the original protein into two halves: an N-terminal region and a C-terminal region; (b) modifying the Cas9 protein sequence (e.g., by genetic engineering techniques) by moving the original C-terminal region (comprising the CP site amino acid) to precede the original N-terminal region, thereby forming a new N-terminus of the Cas9 protein that now begins with the CP site amino acid residue. The CP site can be located in any domain of the Cas9 protein, including, for example, the helical-II domain, the RuvCIII domain, or the CTD domain. For example, the CP site may be located (relative the S. pyogenes Cas9 of SEQ ID NO: 37) at original amino acid residue 181, 199, 230, 270, 310, 1010, 1016, 1023, 1029, 1041, 1247, 1249, or 1282. Thus, once relocated to the N-terminus, original amino acid 181, 199, 230, 270, 310, 1010, 1016, 1023, 1029, 1041, 1247, 1249, or 1282 would become the new N-terminal amino acid. Nomenclature of these CP-Cas9 proteins may be referred to as Cas9-CP¹⁸¹, Cas9-CP¹⁹⁹, Cas9-CP²³⁰, Cas9-CP²⁷⁰, Cas9-CP³¹⁰, Cas9-CP¹⁰¹⁰, Cas9-CP¹⁰¹⁶, Cas9-Cp¹⁰²³, Cas9-CP¹⁰²⁹, Cas9-CP¹⁰⁴¹, Cas9-CP¹²⁴⁷, Cas9-CP¹²⁴⁹, and Cas9-CP¹²⁸², respectively. This description is not meant to be limited to making CP variants from SEQ ID NO: 37, but may be implemented to make CP variants in any Cas9 sequence, either at CP sites that correspond to these positions, or at other CP sites entirely. This description is not meant to limit the specific CP sites in any way. Virtually any CP site may be used to form a CP-Cas9 variant.

[0443] Exemplary CP-Cas9 amino acid sequences, based on the Cas9 of SEQ ID NO: 37, are provided below in which linker sequences are indicated by underlining and optional methionine (M) residues are indicated in bold. It should be appreciated that the disclosure provides CP-Cas9 sequences that do not include a linker sequence or that include different linker sequences. It should be appreciated that CP-Cas9 sequences may be based on Cas9 sequences other than that of SEQ ID NO: 37 and any examples provided herein are not meant to be limiting. Exemplary CP-Cas9 sequences are as follows:

| CP name | Sequence | SEQ ID NO: |
|---|---|---|
| CP1012 | DYKVYDVRKMIAKSEQEIGKATAKYFFYSNIMNFFKTEITLAN | SEQ ID NO: |
| | GEIRKRPLIETNGETGEIVWDKGRDFATVRKVLSMPQVNIVKKT | 88 |
| | EVQTGGFSKESILPKRNSDKLIARKKDWDPKKYGGFDSPTVAY | |
| | SVLVVAKVEKGKSKKLKSVKELLGITIMERSSFEKNPIDFLEAK | |
| | GYKEVKKDLIIKLPKYSLFELENGRKRMLASAGELQKGNELAL | |
| | PSKYVNFLYLASHYEKLKGSPEDNEQKQLFVEQHKHYLDEIIEQ | |
| | ISEFSKRVILADANLDKVLSAYNKHRDKPIREQAENIIHLFTLTN | |
| | LGAPAAFKYFDTTIDRKRYTSTKEVLDATLIHQSITGLYETRIDL | |
| | SQLGGDGGSGGSGGSGGSGGSGGSGGDKKYSIGLAIGTNSVG | |
| | WAVITDEYKVPSKKFKVLGNTDRHSIKKNLIGALLFDSGETAEA | |
| | TRLKRTARRRYTRRKNRICYLQEIFSNEMAKVDDSFFHRLEESF | |
| | LVEEDKKHERHPIFGNIVDEVAYHEKYPTIYHLRKKLVDSTDKA | |
| | DLRLIYLALAHMIKFRGHFLIEGDLNPDNSDVDKLFIQLVQTYN | |
| | QLFEENPINASGVDAKAILSARLSKSRRLENLIAQLPGEKKNGL | |
| | FGNLIALSLGLTPNFKSNFDLAEDAKLQLSKDTYDDDLDNLLA | |
| | QIGDQYADLFLAAKNLSDAILLSDILRVNTEITKAPLSASMIKRY | |
| | DEHHQDLTLLKALVRQQLPEKYKEIFFDQSKNGYAGYIDGGAS | |
| | QEEFYKFIKPILEKMDGTEELLVKLNREDLLRKQRTFDNGSIPH | |
| | QIHLGELHAILRRQEDFYPFLKDNREKIEKILTFRIPYYVGPLAR | |
| | GNSRFAWMTRKSEETITPWNFEEVVDKGASAQSFIERMTNFDK | |
| | NLPNEKVLPKHSLLYEYFTVYNELTKVKYVTEGMRKPAFLSGE | |
| | QKKAIVDLLFKTNRKVTVKQLKEDYFKKIECFDSVEISGVEDRF | |
| | NASLGTYHDLLKIIKDKDFLDNEENEDILEDIVLTLTLFEDREMI | |
| | EERLKTYAHLFDDKVMKQLKRRRYTGWGRLSRKLINGIRDKQ | |
| | SGKTILDFLKSDGFANRNFMQLIHDDSLTFKEDIQKAQVSGQGD | |
| | SLHEHIANLAGSPAIKKGILQTVKVVDELVKVMGRHKPENIVIE | |
| | MARENQTTQKGQKNSRERMKRIEEGIKELGSQILKEHPVENTQ | |
| | LQNEKLYLYYLQNGRDMYVDQELDINRLSDYDVDHIVPQSFLK | |
| | DDSIDNKVLTRSDKNRGKSDNVPSEEVVKKMKNYWRQLLNA | |
| | KLITQRKFDNLTKAERGGLSELDKAGFIKRQLVETRQITKHVAQ | |
| | ILDSRMNTKYDENDKLIREVKVITLKSKLVSDFRKDFQFYKVRE | |
| | INNYHHAHDAYLNAVVGTALIKKYPKLESEFVYG | |
| CP1028 | EIGKATAKYFFYSNIMNFFKTEITLANGEIRKRPLIETNGETGEIV | SEQ ID NO: |
| | WDKGRDFATVRKVLSMPQVNIVKKTEVQTGGFSKESILPKRNS | 89 |
| | DKLIARKKDWDPKKYGGFDSPTVAYSVLVVAKVEKGKSKKL | |
| | KSVKELLGITIMERSSFEKNPIDFLEAKGYKEVKKDLIIKLPKYS | |
| | LFELENGRKRMLASAGELQKGNELALPSKYVNFLYLASHYEK | |
| | LKGSPEDNEQKQLFVEQHKHYLDEIIEQISEFSKRVILADANLD | |
| | KVLSAYNKHRDKPIREQAENIIHLFTLTNLGAPAAFKYFDTTID | |
| | RKRYTSTKEVLDATLIHQSITGLYETRIDLSQLGGDGGSGGSGG | |
| | SGGSGGSGGSGGMDKKYSIGLAIGTNSVGWAVITDEYKVPSK | |
| | KFKVLGNTDRHSIKKNLIGALLFDSGETAEATRLKRTARRRYT | |
| | RRKNRICYLQEIFSNEMAKVDDSFFHRLEESFLVEEDKKHERHP | |
| | IFGNIVDEVAYHEKYPTIYHLRKKLVDSTDKADLRLIYLALAH | |
| | MIKFRGHFLIEGDLNPDNSDVDKLFIQLVQTYNQLFEENPINAS | |
| | GVDAKAILSARLSKSRRLENLIAQLPGEKKNGLFGNLIALSLGL | |
| | TPNFKSNFDLAEDAKLQLSKDTYDDDLDNLLAQIGDQYADLFL | |
| | AAKNLSDAILLSDILRVNTEITKAPLSASMIKRYDEHHQDLTLL | |
| | KALVRQQLPEKYKEIFFDQSKNGYAGYIDGGASQEEFYKFIKPI | |
| | LEKMDGTEELLVKLNREDLLRKQRTFDNGSIPHQIHLGELHAIL | |
| | RRQEDFYPFLKDNREKIEKILTFRIPYYVGPLARGNSRFAWMTR | |
| | KSEETITPWNFEEVVDKGASAQSFIERMTNFDKNLPNEKVLPK | |
| | HSLLYEYFTVYNELTKVKYVTEGMRKPAFLSGEQKKAIVDLLF | |
| | KTNRKVTVKQLKEDYFKKIECFDSVEISGVEDRFNASLGTYHD | |
| | LLKIIKDKDFLDNEENEDILEDIVLTLTLFEDREMIEERLKTYAH | |
| | LFDDKVMKQLKRRRYTGWGRLSRKLINGIRDKQSGKTILDFLK | |
| | SDGFANRNFMQLIHDDSLTFKEDIQKAQVSGQGDSLHEHIANL | |
| | AGSPAIKKGILQTVKVVDELVKVMGRHKPENIVIEMARENQTT | |
| | QKGQKNSRERMKRIEEGIKELGSQILKEHPVENTQLQNEKLYL | |
| | YYLQNGRDMYVDQELDINRLSDYDVDHIVPQSFLKDDSIDNK | |
| | VLTRSDKNRGKSDNVPSEEVVKKMKNYWRQLLNAKLITQRKF | |
| | DNLTKAERGGLSELDKAGFIKRQLVETRQITKHVAQILDSRMN | |
| | TKYDENDKLIREVKVITLKSKLVSDFRKDFQFYKVREINNYHH | |
| | AHDAYLNAVVGTALIKKYPKLESEFVYGDYKVYDVRKMIAKS | |
| | EQ | |
| CP1041 | NIMNFFKTEITLANGEIRKRPLIETNGETGEIVWDKGRDFATVR | SEQ ID NO: |
| | KVLSMPQVNIVKKTEVQTGGFSKESILPKRNSDKLIARKKDWD | 90 |
| | PKKYGGFDSPTVAYSVLVVAKVEKGKSKKLKSVKELLGITIME | |
| | RSSFEKNPIDFLEAKGYKEVKKDLIIKLPKYSLFELENGRKRML | |
| | ASAGELQKGNELALPSKYVNFLYLASHYEKLKGSPEDNEQKQ | |
| | LFVEQHKHYLDEIIEQISEFSKRVILADANLDKVLSAYNKHRDK | |
| | PIREQAENIIHLFTLTNLGAPAAFKYFDTTIDRKRYTSTKEVLDA | |
| | TLIHQSITGLYETRIDLSQLGGDGGSGGSGGSGGSGGSGGSGGD | |
| | KKYSIGLAIGTNSVGWAVITDEYKVPSKKFKVLGNTDRHSIKK | |
| | NLIGALLFDSGETAEATRLKRTARRRYTRRKNRICYLQEIFSNE | |
| | MAKVDDSFFHRLEESFLVEEDKKHERHPIFGNIVDEVAYHEKY | |
| | PTIYHLRKKLVDSTDKADLRLIYLALAHMIKFRGHFLIEGDLNP | |
| | DNSDVDKLFIQLVQTYNQLFEENPINASGVDAKAILSARLSKSR | |
| | RLENLIAQLPGEKKNGLFGNLIALSLGLTPNFKSNFDLAEDAKL | |
| | QLSKDTYDDDLDNLLAQIGDQYADLFLAAKNLSDAILLSDILR | |
| | VNTEITKAPLSASMIKRYDEHHQDLTLLKALVRQQLPEKYKEIF | |
| | FDQSKNGYAGYIDGGASQEEFYKFIKPILEKMDGTEELLVKLN | |
| | REDLLRKQRTFDNGSIPHQIHLGELHAILRRQEDFYPFLKDNRE | |
| | KIEKILTFRIPYYVGPLARGNSRFAWMTRKSEETITPWNFEEVV | |
| | DKGASAQSFIERMTNFDKNLPNEKVLPKHSLLYEYFTVYNELT | |
| | KVKYVTEGMRKPAFLSGEQKKAIVDLLFKTNRKVTVKQLKED | |
| | YFKKIECFDSVEISGVEDRFNASLGTYHDLLKIIKDKDFLDNEE | |
| | NEDILEDIVLTLTLFEDREMIEERLKTYAHLFDDKVMKQLKRR | |
| | RYTGWGRLSRKLINGIRDKQSGKTILDFLKSDGFANRNFMQLI | |
| | HDDSLTFKEDIQKAQVSGQGDSLHEHIANLAGSPAIKKGILQTV | |
| | KVVDELVKVMGRHKPENIVIEMARENQTTQKGQKNSRERMK | |
| | RIEEGIKELGSQILKEHPVENTQLQNEKLYLYYLQNGRDMYVD | |
| | QELDINRLSDYDVDHIVPQSFLKDDSIDNKVLTRSDKNRGKSD | |
| | NVPSEEVVKKMKNYWRQLLNAKLITQRKFDNLTKAERGGLSE | |
| | LDKAGFIKRQLVETRQITKHVAQILDSRMNTKYDENDKLIREV | |
| | KVITLKSKLVSDFRKDFQFYKVREINNYHHAHDAYLNAVVGT | |
| | ALIKKYPKLESEFVYGDYKVYDVRKMIAKSEQEIGKATAKYFF | |
| | YS | |
| CP1249 | PEDNEQKQLFVEQHKHYLDEIIEQISEFSKRVILADANLDKVLS | SEQ ID NO: |
| | AYNKHRDKPIREQAENIIHLFTLTNLGAPAAFKYFDTTIDRKRY | 91 |
| | TSTKEVLDATLIHQSITGLYETRIDLSQLGGDGGSGGSGGSGGS | |
| | GGSGGSGGMDKKYSIGLAIGTNSVGWAVITDEYKVPSKKFKV | |
| | LGNTDRHSIKKNLIGALLFDSGETAEATRLKRTARRRYTRRKN | |
| | RICYLQEIFSNEMAKVDDSFFHRLEESFLVEEDKKHERHPIFGNI | |
| | VDEVAYHEKYPTIYHLRKKLVDSTDKADLRLIYLALAHMIKFR | |
| | GHFLIEGDLNPDNSDVDKLFIQLVQTYNQLFEENPINASGVDAK | |
| | AILSARLSKSRRLENLIAQLPGEKKNGLFGNLIALSLGLTPNFKS | |
| | NFDLAEDAKLQLSKDTYDDDLDNLLAQIGDQYADLFLAAKNL | |
| | SDAILLSDILRVNTEITKAPLSASMIKRYDEHHQDLTLLKALVR | |
| | QQLPEKYKEIFFDQSKNGYAGYIDGGASQEEFYKFIKPILEKMD | |
| | GTEELLVKLNREDLLRKQRTFDNGSIPHQIHLGELHAILRRQED | |
| | FYPFLKDNREKIEKILTFRIPYYVGPLARGNSRFAWMTRKSEETI | |
| | TPWNFEEVVDKGASAQSFIERMTNFDKNLPNEKVLPKHSLLYE | |
| | YFTVYNELTKVKYVTEGMRKPAFLSGEQKKAIVDLLFKTNRK | |
| | VTVKQLKEDYFKKIECFDSVEISGVEDRFNASLGTYHDLLKIIK | |
| | DKDFLDNEENEDILEDIVLTLTLFEDREMIEERLKTYAHLFDDK | |
| | VMKQLKRRRYTGWGRLSRKLINGIRDKQSGKTILDFLKSDGFA | |
| | NRNFMQLIHDDSLTFKEDIQKAQVSGQGDSLHEHIANLAGSPAI | |
| | KKGILQTVKVVDELVKVMGRHKPENIVIEMARENQTTQKGQK | |
| | NSRERMKRIEEGIKELGSQILKEHPVENTQLQNEKLYLYYLQN | |
| | GRDMYVDQELDINRLSDYDVDHIVPQSFLKDDSIDNKVLTRSD | |
| | KNRGKSDNVPSEEVVKKMKNYWRQLLNAKLITQRKFDNLTK | |
| | AERGGLSELDKAGFIKRQLVETRQITKHVAQILDSRMNTKYDE | |
| | NDKLIREVKVITLKSKLVSDFRKDFQFYKVREINNYHHAHDAY | |
| | LNAVVGTALIKKYPKLESEFVYGDYKVYDVRKMIAKSEQEIGK | |
| | ATAKYFFYSNIMNFFKTEITLANGEIRKRPLIETNGETGEIVWDK | |
| | GRDFATVRKVLSMPQVNIVKKTEVQTGGFSKESILPKRNSDKLI | |
| | ARKKDWDPKKYGGFDSPTVAYSVLVVAKVEKGKSKKLKSVK | |
| | ELLGITIMERSSFEKNPIDFLEAKGYKEVKKDLIIKLPKYSLFELE | |
| | NGRKRMLASAGELQKGNELALPSKYVNFLYLASHYEKLKGS | |
| CP1300 | KPIREQAENIIHLFTLTNLGAPAAFKYFDTTIDRKRYTSTKEVLD | SEQ ID NO: |
| | ATLIHQSITGLYETRIDLSQLGGDGGSGGSGGSGGSGGSGGSGG | 92 |
| | DKKYSIGLAIGTNSVGWAVITDEYKVPSKKFKVLGNTDRHSIK | |
| | KNLIGALLFDSGETAEATRLKRTARRRYTRRKNRICYLQEIFSN | |
| | EMAKVDDSFFHRLEESFLVEEDKKHERHPIFGNIVDEVAYHEK | |
| | YPTIYHLRKKLVDSTDKADLRLIYLALAHMIKFRGHFLIEGDLN | |
| | PDNSDVDKLFIQLVQTYNQLFEENPINASGVDAKAILSARLSKS | |
| | RRLENLIAQLPGEKKNGLFGNLIALSLGLTPNFKSNFDLAEDAK | |
| | LQLSKDTYDDDLDNLLAQIGDQYADLFLAAKNLSDAILLSDIL | |
| | RVNTEITKAPLSASMIKRYDEHHQDLTLLKALVRQQLPEKYKEI | |
| | FFDQSKNGYAGYIDGGASQEEFYKFIKPILEKMDGTEELLVKLN | |
| | REDLLRKQRTFDNGSIPHQIHLGELHAILRRQEDFYPFLKDNRE | |
| | KIEKILTFRIPYYVGPLARGNSRFAWMTRKSEETITPWNFEEVV | |
| | DKGASAQSFIERMTNFDKNLPNEKVLPKHSLLYEYFTVYNELT | |
| | KVKYVTEGMRKPAFLSGEQKKAIVDLLFKTNRKVTVKQLKED | |
| | YFKKIECFDSVEISGVEDRFNASLGTYHDLLKIIKDKDFLDNEE | |
| | NEDILEDIVLTLTLFEDREMIEERLKTYAHLFDDKVMKQLKRR | |
| | RYTGWGRLSRKLINGIRDKQSGKTILDFLKSDGFANRNFMQLI | |
| | HDDSLTFKEDIQKAQVSGQGDSLHEHIANLAGSPAIKKGILQTV | |
| | KVVDELVKVMGRHKPENIVIEMARENQTTQKGQKNSRERMK | |
| | RIEEGIKELGSQILKEHPVENTQLQNEKLYLYYLQNGRDMYVD | |
| | QELDINRLSDYDVDHIVPQSFLKDDSIDNKVLTRSDKNRGKSD | |
| | NVPSEEVVKKMKNYWRQLLNAKLITQRKFDNLTKAERGGLSE | |
| | LDKAGFIKRQLVETRQITKHVAQILDSRMNTKYDENDKLIREV | |
| | KVITLKSKLVSDFRKDFQFYKVREINNYHHAHDAYLNAVVGT | |
| | ALIKKYPKLESEFVYGDYKVYDVRKMIAKSEQEIGKATAKYFF | |
| | YSNIMNFFKTEITLANGEIRKRPLIETNGETGEIVWDKGRDFAT | |
| | VRKVLSMPQVNIVKKTEVQTGGFSKESILPKRNSDKLIARKKD | |
| | WDPKKYGGFDSPTVAYSVLVVAKVEKGKSKKLKSVKELLGITI | |
| | MERSSFEKNPIDFLEAKGYKEVKKDLIIKLPKYSLFELENGRKR | |
| | MLASAGELQKGNELALPSKYVNFLYLASHYEKLKGSPEDNEQ | |
| | KQLFVEQHKHYLDEIIEQISEFSKRVILADANLDKVLSAYNKHR | |
| | D | |

[0444] The Cas9 circular permutants that may be useful in the prime editing constructs described herein. Exemplary C-terminal fragments of Cas9, based on the Cas9 of SEQ ID NO: 37, which may be rearranged to an N-terminus of Cas9, are provided below. It should be appreciated that such C-terminal fragments of Cas9 are exemplary and are not meant to be limiting. These exemplary CP-Cas9 fragments have the following sequences:

| CP name | Sequence | SEQ ID NO: |
|---|---|---|
| CP1012 | DYKVYDVRKMIAKSEQEIGKATAKYFFYSNIMNFFKTEITLAN | SEQ ID NO: |
| C- | GEIRKRPLIETNGETGEIVWDKGRDFATVRKVLSMPQVNIVKK | 93 |
| terminal | TEVQTGGFSKESILPKRNSDKLIARKKDWDPKKYGGFDSPTVA | |
| fragment | YSVLVVAKVEKGKSKKLKSVKELLGITIMERSSFEKNPIDFLEA | |
| | KGYKEVKKDLIIKLPKYSLFELENGRKRMLASAGELQKGNELA | |
| | LPSKYVNFLYLASHYEKLKGSPEDNEQKQLFVEQHKHYLDEIIE | |
| | QISEFSKRVILADANLDKVLSAYNKHRDKPIREQAENIIHLFTLT | |
| | NLGAPAAFKYFDTTIDRKRYTSTKEVLDATLIHQSITGLYETRID | |
| | LSQLGGD | |
| CP1028 | EIGKATAKYFFYSNIMNFFKTEITLANGEIRKRPLIETNGETGEIV | SEQ ID NO: 94 |
| C- | WDKGRDFATVRKVLSMPQVNIVKKTEVQTGGFSKESILPKRNS | |
| terminal | DKLIARKKDWDPKKYGGFDSPTVAYSVLVVAKVEKGKSKKL | |
| fragment | KSVKELLGITIMERSSFEKNPIDFLEAKGYKEVKKDLIIKLPKYS | |
| | LFELENGRKRMLASAGELQKGNELALPSKYVNFLYLASHYEK | |
| | LKGSPEDNEQKQLFVEQHKHYLDEIIEQISEFSKRVILADANLD | |
| | KVLSAYNKHRDKPIREQAENIIHLFTLTNLGAPAAFKYFDTTID | |
| | RKRYTSTKEVLDATLIHQSITGLYETRIDLSQLGGD | |
| CP1041 | NIMNFFKTEITLANGEIRKRPLIETNGETGEIVWDKGRDFATVR | SEQ ID NO: |
| C- | KVLSMPQVNIVKKTEVQTGGFSKESILPKRNSDKLIARKKDWD | 95 |
| terminal | PKKYGGFDSPTVAYSVLVVAKVEKGKSKKLKSVKELLGITIME | |
| fragment | RSSFEKNPIDFLEAKGYKEVKKDLIIKLPKYSLFELENGRKRML | |
| | ASAGELQKGNELALPSKYVNFLYLASHYEKLKGSPEDNEQKQ | |
| | LFVEQHKHYLDEIIEQISEFSKRVILADANLDKVLSAYNKHRDK | |
| | PIREQAENIIHLFTLTNLGAPAAFKYFDTTIDRKRYTSTKEVLDA | |
| | TLIHQSITGLYETRIDLSQLGGD | |
| CP1249 | PEDNEQKQLFVEQHKHYLDEIIEQISEFSKRVILADANLDKVLS | SEQ ID NO: |
| C- | AYNKHRDKPIREQAENIIHLFTLTNLGAPAAFKYFDTTIDRKRY | 96 |
| terminal | TSTKEVLDATLIHQSITGLYETRIDLSQLGGD | |
| fragment | | |
| CP1300 | KPIREQAENIIHLFTLTNLGAPAAFKYFDTTIDRKRYTSTKEVLD | SEQ ID NO: |
| C- | ATLIHQSITGLYETRIDLSQLGGD | 97 |
| terminal | | |
| fragment | | |

I. Cas9 Variants with Modified PAM Specificities

[0445] The prime editors of the present disclosure may also comprise Cas9 variants with modified PAM specificities. Some aspects of this disclosure provide Cas9 proteins that exhibit activity on a target sequence that does not comprise the canonical PAM (5′-NGG-3′, where N is A, C, G, or T) at its 3Y-end. In some embodiments, the Cas9 protein exhibits activity on a target sequence comprising a 5′-NGG-3′ PAM sequence at its 3Y-end. In some embodiments, the Cas9 protein exhibits activity on a target sequence comprising a 5″-NNG-3′ PAM sequence at its 3′-end. In some embodiments, the Cas9 protein exhibits activity on a target sequence comprising a 5′-NNA-3′ PAM sequence at its 3′-end. In some embodiments, the Cas9 protein exhibits activity on a target sequence comprising a 5′-NNC-3′ PAM sequence at its 3′-end. In some embodiments, the Cas9 protein exhibits activity on a target sequence comprising a 5′-NNT-3′ PAM sequence at its 3′-end. In some embodiments, the Cas9 protein exhibits activity on a target sequence comprising a 5′-NGT-3′ PAM sequence at its 3′-end. In some embodiments, the Cas9 protein exhibits activity on a target sequence comprising a 5′-NGA-3′ PAM sequence at its 3′-end. In some embodiments, the Cas9 protein exhibits activity on a target sequence comprising a 5′-NGC-3′ PAM sequence at its 3′-end. In some embodiments, the Cas9 protein exhibits activity on a target sequence comprising a 5′-NAA-3′ PAM sequence at its 3′-end. In some embodiments, the Cas9 protein exhibits activity on a target sequence comprising a 5′-NAC-3′ PAM sequence at its 3′-end. In some embodiments, the Cas9 protein exhibits activity on a target sequence comprising a 5′-NAT-3′ PAM sequence at its 3′-end. In still other embodiments, the Cas9 protein exhibits activity on a target sequence comprising a 5′-NAG-3′ PAM sequence at its 3′-end.

[0446] It should be appreciated that any of the amino acid mutations described herein, (e.g., A262T) from a first amino acid residue (e.g., A) to a second amino acid residue (e.g., T) may also include mutations from the first amino acid residue to an amino acid residue that is similar to (e.g., conserved) the second amino acid residue. For example, mutation of an amino acid with a hydrophobic side chain (e.g., alanine, valine, isoleucine, leucine, methionine, phenylalanine, tyrosine, or tryptophan) may be a mutation to a second amino acid with a different hydrophobic side chain (e.g., alanine, valine, isoleucine, leucine, methionine, phenylalanine, tyrosine, or tryptophan). For example, a mutation of an alanine to a threonine (e.g., a A262T mutation) may also be a mutation from an alanine to an amino acid that is similar in size and chemical properties to a threonine, for example, serine. As another example, mutation of an amino acid with a positively charged side chain (e.g., arginine, histidine, or lysine) may be a mutation to a second amino acid with a different positively charged side chain (e.g., arginine, histidine, or lysine). As another example, mutation of an amino acid with a polar side chain (e.g., serine, threonine, asparagine, or glutamine) may be a mutation to a second amino acid with a different polar side chain (e.g., serine, threonine, asparagine, or glutamine). Additional similar amino acid pairs include, but are not limited to, the following: phenylalanine and tyrosine; asparagine and glutamine; methionine and cysteine; aspartic acid and glutamic acid; and arginine and lysine. The skilled artisan would recognize that such conservative amino acid substitutions will likely have minor effects on protein structure and are likely to be well tolerated without compromising function. In some embodiments, any amino of the amino acid mutations provided herein from one amino acid to a threonine may be an amino acid mutation to a serine. In some embodiments, any amino of the amino acid mutations provided herein from one amino acid to an arginine may be an amino acid mutation to a lysine. In some embodiments, any amino of the amino acid mutations provided herein from one amino acid to an isoleucine, may be an amino acid mutation to an alanine, valine, methionine, or leucine. In some embodiments, any amino of the amino acid mutations provided herein from one amino acid to a lysine may be an amino acid mutation to an arginine. In some embodiments, any amino of the amino acid mutations provided herein from one amino acid to an aspartic acid may be an amino acid mutation to a glutamic acid or asparagine. In some embodiments, any amino of the amino acid mutations provided herein from one amino acid to a valine may be an amino acid mutation to an alanine, isoleucine, methionine, or leucine. In some embodiments, any amino of the amino acid mutations provided herein from one amino acid to a glycine may be an amino acid mutation to an alanine. It should be appreciated, however, that additional conserved amino acid residues would be recognized by the skilled artisan and any of the amino acid mutations to other conserved amino acid residues are also within the scope of this disclosure.

[0447] In some embodiments, the Cas9 protein comprises a combination of mutations that exhibit activity on a target sequence comprising a 5′-NAA-3′ PAM sequence at its 3′-end. In some embodiments, the combination of mutations are present in any one of the clones listed in Table 1. In some embodiments, the combination of mutations are conservative mutations of the clones listed in Table 1. In some embodiments, the Cas9 protein comprises the combination of mutations of any one of the Cas9 clones listed in Table 1.

TABLE 1
NAA PAM Clones
Mutations from wild-type SpCas9 (e.g., SEQ ID NO: 37)

D177N, K218R, D614N, D1135N, P1137S, E1219V, A1320V, A1323D, R1333K
D177N, K218R, D614N, D1135N, E1219V, Q1221H, H1264Y, A1320V, R1333K
A10T, I322V, S409I, E427G, G715C, D1135N, E1219V, Q1221H, H1264Y, A1320V,
R1333K
A367T, K710E, R1114G, D1135N, P1137S, E1219V, Q1221H, H1264Y, A1320V, R1333K
A10T, I322V, S409I, E427G, R753G, D861N, D1135N, K1188R, E1219V, Q1221H,
H1264H, A1320V, R1333K
A10T, I322V, S409I, E427G, R654L, V743I, R753G, M1021T, D1135N, D1180G, K1211R,
E1219V, Q1221H, H1264Y, A1320V, R1333K
A10T, I322V, S409I, E427G, V743I, R753G, E762G, D1135N, D1180G, K1211R, E1219V,
Q1221H, H1264Y, A1320V, R1333K
A10T, I322V, S409I, E427G, R753G, D1135N, D1180G, K1211R, E1219V, Q1221H,
H1264Y, S1274R, A1320V, R1333K
A10T, I322V, S409I, E427G, A589S, R753G, D1135N, E1219V, Q1221H, H1264H,
A1320V, R1333K
A10T, I322V, S409I, E427G, R753G, E757K, G865G, D1135N, E1219V, Q1221H, H1264Y,
A1320V, R1333K
A10T, I322V, S409I, E427G, R654L, R753G, E757K, D1135N, E1219V, Q1221H, H1264Y,
A1320V, R1333K
A10T, I322V, S409I, E427G, K599R, M631A, R654L, K673E, V743I, R753G, N758H,
E762G, D1135N, D1180G, E1219V, Q1221H, Q1256R, H1264Y, A1320V, A1323D,
R1333K
A10T, I322V, S409I, E427G, R654L, K673E, V743I, R753G, E762G, N869S, N1054D,
R1114G, D1135N, D1180G, E1219V, Q1221H, H1264Y, A1320V, A1323D, R1333K
A10T, I322V, S409I, E427G, R654L, L727I, V743I, R753G, E762G, R859S, N946D,
F1134L, D1135N, D1180G, E1219V, Q1221H, H1264Y, N1317T, A1320V, A1323D,
R1333K
A10T, I322V, S409I, E427G, R654L, K673E, V743I, R753G, E762G, N803S, N869S,
Y1016D, G1077D, R1114G, F1134L, D1135N, D1180G, E1219V, Q1221H, H1264Y,
V1290G, L1318S, A1320V, A1323D, R1333K
A10T, I322V, S409I, E427G, R654L, K673E, V743I, R753G, E762G, N803S, N869S,
Y1016D, G1077D, R1114G, F1134L, D1135N, K1151E, D1180G, E1219V, Q1221H,
H1264Y, V1290G, E1318S, A1320V, R1333K
A10T, I322V, S409I, E427G, R654L, K673E, V743I, R753G, E762G, N803S, N869S,
Y1016D, G1077D, R1114G, F1134L, D1135N, D1180G, E1219V, Q1221H, H1264Y,
V1290G, L1318S, A1320V, A1323D, R1333K
A10T, I322V, S409I, E427G, R654L, K673E, F693L, V743I, R753G, E762G, N803S, N869S,
L921P, Y1016D, G1077D, F1080S, R1114G, D1135N, D1180G, E1219V, Q1221H, H1264Y,
L1318S, A1320V, A1323D, R1333K
A10T, I322V, S409I, E427G, E630K, R654L, K673E, V743I, R753G, E762G, Q768H,
N803S, N869S, Y1016D, G1077D, R1114G, F1134L, D1135N, D1180G, E1219V, Q1221H,
H1264Y, L1318S, A1320V, R1333K
A10T, I322V, S409I, E427G, R654L, K673E, F693L, V743I, R753G, E762G, Q768H,
N803S, N869S, Y1016D, G1077D, R1114G, F1134L, D1135N, D1180G, E1219V, Q1221H,
G1223S, H1264Y, L1318S, A1320V, R1333K
A10T, I322V, S409I, E427G, R654L, K673E, F693L, V743I, R753G, E762G, N803S, N869S,
L921P, Y1016D, G1077D, F1801S, R1114G, D1135N, D1180G, E1219V, Q1221H, H1264Y,
L1318S, A1320V, A1323D, R1333K
A10T, I322V, S409I, E427G, R654L, V743I, R753G, M1021T, D1135N, D1180G, K1211R,
E1219V, Q1221H, H1264Y, A1320V, R1333K
A10T, I322V, S409I, E427G, R654L, K673E, V743I, R753G, E762G, M673I, N803S, N869S,
G1077D, R1114G, D1135N, V1139A, D1180G, E1219V, Q1221H, A1320V, R1333K
A10T, I322V, S409I, E427G, R654L, K673E, V743I, R753G, E762G, N803S, N869S,
R1114G, D1135N, E1219V, Q1221H, A1320V, R1333K

[0448] In some embodiments, the Cas9 protein comprises an amino acid sequence that is at least 80% identical to the amino acid sequence of a Cas9 protein as provided by any one of the variants of Table 1. In some embodiments, the Cas9 protein comprises an amino acid sequence that is at least 85%, at least 90%, at least 92%, at least 95%, at least 96%, at least 97%, at least 98%, at least 99%, or at least 99.5% identical to the amino acid sequence of a Cas9 protein as provided by any one of the variants of Table 1.

[0449] In some embodiments, the Cas9 protein exhibits an increased activity on a target sequence that does not comprise the canonical PAM (5′-NGG-3′) at its 3′ end as compared to Streptococcus pyogenes Cas9 as provided by SEQ ID NO: 37. In some embodiments, the Cas9 protein exhibits an activity on a target sequence having a 3′ end that is not directly adjacent to the canonical PAM sequence (5′-NGG-3′) that is at least 5-fold increased as compared to the activity of Streptococcus pyogenes Cas9 as provided by SEQ ID NO: 37 on the same target sequence. In some embodiments, the Cas9 protein exhibits an activity on a target sequence that is not directly adjacent to the canonical PAM sequence (5′-NGG-3′) that is at least 10-fold, at least 50-fold, at least 100-fold, at least 500-fold, at least 1,000-fold, at least 5,000-fold, at least 10,000-fold, at least 50,000-fold, at least 100,000-fold, at least 500,000-fold, or at least 1,000,000-fold increased as compared to the activity of Streptococcus pyogenes as provided by SEQ ID NO: 37 on the same target sequence. In some embodiments, the 3′ end of the target sequence is directly adjacent to an AAA, GAA, CAA, or TAA sequence. In some embodiments, the Cas9 protein comprises a combination of mutations that exhibit activity on a target sequence comprising a 5′-NAC-3′ PAM sequence at its 3′-end. In some embodiments, the combination of mutations are present in any one of the clones listed in Table 2. In some embodiments, the combination of mutations are conservative mutations of the clones listed in Table 2. In some embodiments, the Cas9 protein comprises the combination of mutations of any one of the Cas9 clones listed in Table 2.

TABLE 2
NAC PAM Clones
MUTATIONS FROM WILD-TYPE SPCAS9 (E.G., SEQ ID NO: 37)

T472I, R753G, K890E, D1332N, R1335Q, T1337N
I1057S, D1135N, P1301S, R1335Q, T1337N
T472I, R753G, D1332N, R1335Q, T1337N
D1135N, E1219V, D1332N, R1335Q, T1337N
T472I, R753G, K890E, D1332N, R1335Q, T1337N
I1057S, D1135N, P1301S, R1335Q, T1337N
T472I, R753G, D1332N, R1335Q, T1337N
T472I, R753G, Q771H, D1332N, R1335Q, T1337N
E627K, T638P, K652T, R753G, N803S, K959N, R1114G, D1135N, E1219V, D1332N,
R1335Q, T1337N
E627K, T638P, K652T, R753G, N803S, K959N, R1114G, D1135N, K1156E, E1219V,
D1332N, R1335Q, T1337N
E627K, T638P, V647I, R753G, N803S, K959N, G1030R, I1055E, R1114G, D1135N, E1219V,
D1332N, R1335Q, T1337N
E627K, E630G, T638P, V647A, G687R, N767D, N803S, K959N, R1114G, D1135N, E1219V,
D1332G, R1335Q, T1337N
E627K, T638P, R753G, N803S, K959N, R1114G, D1135N, E1219V, N1266H, D1332N,
R1335Q, T1337N
E627K, T638P, R753G, N803S, K959N, I1057T, R1114G, D1135N, E1219V, D1332N,
R1335Q, T1337N
E627K, T638P, R753G, N803S, K959N, R1114G, D1135N, E1219V, D1332N, R1335Q,
T1337N
E627K, M631I, T638P, R753G, N803S, K959N, Y1036H, R1114G, D1135N, E1219V,
D1251G, D1332G, R1335Q, T1337N
E627K, T638P, R753G, N803S, V875I, K959N, Y1016C, R1114G, D1135N, E1219V,
D1251G, D1332G, R1335Q, T1337N, I1348V
K608R, E627K, T638P, V647I, R654L, R753G, N803S, T804A, K848N, V922A, K959N,
R1114G, D1135N, E1219V, D1332N, R1335Q, T1337N
K608R, E627K, T638P, V647I, R753G, N803S, V922A, K959N, K1014N, V1015A, R1114G,
D1135N, K1156N, E1219V, N1252D, D1332N, R1335Q, T1337N
K608R, E627K, R629G, T638P, V647I, A711T, R753G, K775R, K789E, N803S, K959N,
V1015A, Y1036H, R1114G, D1135N, E1219V, N1286H, D1332N, R1335Q, T1337N
K608R, E627K, T638P, V647I, T740A, R753G, N803S, K948E, K959N, Y1016S, R1114G,
D1135N, E1219V, N1286H, D1332N, R1335Q, T1337N
K608R, E627K, T638P, V647I, T740A, N803S, K948E, K959N, Y1016S, R1114G, D1135N,
E1219V, N1286H, D1332N, R1335Q, T1337N
I670S, K608R, E627K, E630G, T638P, V647I, R653K, R753G, I795L, K797N, N803S,
K866R, K890N, K959N, Y1016C, R1114G, D1135N, E1219V, D1332N, R1335Q, T1337N
K608R, E627K, T638P, V647I, T740A, G752R, R753G, K797N, N803S, K948E, K959N,
V1015A, Y1016S, R1114G, D1135N, E1219V, N1266H, D1332N, R1335Q, T1337N
I570T, A589V, K608R, E627K, T638P, V647I, R654L, Q716R, R753G, N803S, K948E,
K959N, Y1016S, R1114G, D1135N, E1207G, E1219V, N1234D, D1332N, R1335Q, T1337N
K608R, E627K, R629G, T638P, V647I, R654L, Q740R, R753G, N803S, K959N, N990S,
T995S, V1015A, Y1036D, R1114G, D1135N, E1207G, E1219V, N1234D, N1266H, D1332N,
R1335Q, T1337N
I562F, V565D, I570T, K608R, L625S, E627K, T638P, V647I, R654I, G752R, R753G, N803S,
N808D, K959N, M1021L, R1114G, D1135N, N1177S, N1234D, D1332N, R1335Q, T1337N
I562F, I570T, K608R, E627K, T638P, V647I, R753G, E790A, N803S, K959N, V1015A,
Y1036H, R1114G, D1135N, D1180E, A1184T, E1219V, D1332N, R1335Q, T1337N
I570T, K608R, E627K, T638P, V647I, R654H, R753G, E790A, N803S, K959N, V1015A,
R1114G, D1127A, D1135N, E1219V, D1332N, R1335Q, T1337N
I570T, K608R, L625S, E627K, T638P, V647I, R654I, T703P, R753G, N803S, N808D, K959N,
M1021L, R1114G, D1135N, E1219V, D1332N, R1335Q, T1337N
I570S, K608R, E627K, E630G, T638P, V647I, R653K, R753G, I795L, N803S, K866R,
K890N, K959N, Y1016C, R1114G, D1135N, E1219V, D1332N, R1335Q, T1337N
I570T, K608R, E627K, T638P, V647I, R654H, R753G, E790A, N803S, K959N, V1016A,
R1114G, D1135N, E1219V, K1246E, D1332N, R1335Q, T1337N
K608R, E627K, T638P, V647I, R654L, K673E, R753G, E790A, N803S, K948E, K959N,
R1114G, D1127G, D1135N, D1180E, E1219V, N1286H, D1332N, R1335Q, T1337N
K608R, L625S, E627K, T638P, V647I, R654I, I670T, R753G, N803S, N808D, K959N,
M1021L, R1114G, D1135N, E1219V, N1286H, D1332N, R1335Q, T1337N
E627K, M631V, T638P, V647I, K710E, R753G, N803S, N808D, K948E, M1021L, R1114G,
D1135N, E1219V, D1332N, R1335Q, T1337N, S1338T, H1349R

[0450] In some embodiments, the Cas9 protein comprises an amino acid sequence that is at least 80% identical to the amino acid sequence of a Cas9 protein as provided by any one of the variants of Table 2. In some embodiments, the Cas9 protein comprises an amino acid sequence that is at least 85%, at least 90%, at least 92%, at least 95%, at least 96%, at least 97%, at least 98%, at least 99%, or at least 99.5% identical to the amino acid sequence of a Cas9 protein as provided by any one of the variants of Table 2.

[0451] In some embodiments, the Cas9 protein exhibits an increased activity on a target sequence that does not comprise the canonical PAM (5′-NGG-3′) at its 3′ end as compared to Streptococcus pyogenes Cas9 as provided by SEQ ID NO: 37. In some embodiments, the Cas9 protein exhibits an activity on a target sequence having a 3′ end that is not directly adjacent to the canonical PAM sequence (5′-NGG-3′) that is at least 5-fold increased as compared to the activity of Streptococcus pyogenes Cas9 as provided by SEQ ID NO: 37 on the same target sequence. In some embodiments, the Cas9 protein exhibits an activity on a target sequence that is not directly adjacent to the canonical PAM sequence (5′-NGG-3′) that is at least 10-fold, at least 50-fold, at least 100-fold, at least 500-fold, at least 1,000-fold, at least 5,000-fold, at least 10,000-fold, at least 50,000-fold, at least 100,000-fold, at least 500,000-fold, or at least 1,000,000-fold increased as compared to the activity of Streptococcus pyogenes as provided by SEQ ID NO: 37 on the same target sequence. In some embodiments, the 3′ end of the target sequence is directly adjacent to an AAC, GAC, CAC, or TAC sequence.

[0452] In some embodiments, the Cas9 protein comprises a combination of mutations that exhibit activity on a target sequence comprising a 5′-NAT-3′ PAM sequence at its 3′-end. In some embodiments, the combination of mutations are present in any one of the clones listed in Table 3. In some embodiments, the combination of mutations are conservative mutations of the clones listed in Table 3. In some embodiments, the Cas9 protein comprises the combination of mutations of any one of the Cas9 clones listed in Table 3.

TABLE 3
NAT PAM Clones
MUTATIONS FROM WILD-TYPE SPCAS9 (E.G., SEQ ID NO: 37)

K961E, H985Y, D1135N, K1191N, E1219V, Q1221H, A1320A, P1321S, R1335L
D1135N, G1218S, E1219V, Q1221H, P1249S, P1321S, D1322G, R1335L
V743I, R753G, E790A, D1135N, G1218S, E1219V, Q1221H, A1227V, P1249S, N1286K,
A1293T, P1321S, D1322G, R1335L, T1339I
F575S, M631L, R654L, V748I, V743I, R753G, D853E, V922A, R1114G D1135N, G1218S,
E1219V, Q1221H, A1227V, P1249S, N1286K, A1293T, P1321S, D1322G, R1335L, T1339I
F575S, M631L, R654L, R664K, R753G, D853E, V922A, R1114G D1135N, D1180G, G1218S,
E1219V, Q1221H, P1249S, N1286K, P1321S, D1322G, R1335L
M631L, R654L, R753G, K797E, D853E, V922A, D1012A, R1114G D1135N, G1218S,
E1219V, Q1221H, P1249S, N1317K, P1321S, D1322G, R1335L
F575S, M631L, R654L, R664K, R753G, D853E, V922A, R1114G, Y1131C, D1135N,
D1180G, G1218S, E1219V, Q1221H, P1249S, P1321S, D1322G, R1335L
F575S, M631L, R654L, R664K, R753G, D853E, V922A, R1114G, Y1131C, D1135N,
D1180G, G1218S, E1219V, Q1221H, P1249S, P1321S, D1322G, R1335L
F575S, D596Y, M631L, R654L, R664K, R753G, D853E, V922A, R1114G, Y1131C, D1135N,
D1180G, G1218S, E1219V, Q1221H, P1249S, Q1256R, P1321S, D1322G, R1335L
F575S, M631L, R654L, R664K, K710E, V750A, R753G, D853E, V922A, R1114G, Y1131C,
D1135N, D1180G, G1218S, E1219V, Q1221H, P1249S, P1321S, D1322G, R1335L
F575S, M631L, K649R, R654L, R664K, R753G, D853E, V922A, R1114G, Y1131C, D1135N,
K1156E, D1180G, G1218S, E1219V, Q1221H, P1249S, P1321S, D1322G, R1335L
F575S, M631L, R654L, R664K, R753G, D853E, V922A, R1114G, Y1131C, D1135N,
D1180G, G1218S, E1219V, Q1221H, P1249S, P1321S, D1322G, R1335L
F575S, M631L, R654L, R664K, R753G, D853E, V922A, I1057G, R1114G, Y1131C, D1135N,
D1180G, G1218S, E1219V, Q1221H, P1249S, N1308D, P1321S, D1322G, R1335L
M631L, R654L, R753G, D853E, V922A, R1114G, Y1131C, D1135N, E1150V, D1180G,
G1218S, E1219V, Q1221H, P1249S, P1321S, D1332G, R1335L
M631L, R654L, R664K, R753G, D853E, I1057V, Y1131C, D1135N, D1180G, G1218S,
E1219V, Q1221H, P1249S, P1321S, D1332G, R1335L
M631L, R654L, R664K, R753G, I1057V, R1114G, Y1131C, D1135N, D1180G, G1218S,
E1219V, Q1221H, P1249S, P1321S, D1332G, R1335L

[0453] The above description of various napDNAbps which can be used in connection with the presently disclose prime editors is not meant to be limiting in any way. The prime editors may comprise the canonical SpCas9, or any ortholog Cas9 protein, or any variant Cas9 protein—including any naturally occurring variant, mutant, or otherwise engineered version of Cas9—that is known or which can be made or evolved through a directed evolutionary or otherwise mutagenic process. In various embodiments, the Cas9 or Cas9 variants have a nickase activity, i.e., only cleave of strand of the target DNA sequence. In other embodiments, the Cas9 or Cas9 variants have inactive nucleases, i.e., are “dead” Cas9 proteins. Other variant Cas9 proteins that may be used are those having a smaller molecular weight than the canonical SpCas9 (e.g., for easier delivery) or having modified or rearranged primary amino acid structure (e.g., the circular permutant formats). The prime editors described herein may also comprise Cas9 equivalents, including Cas12a/Cpf1 and Cas12b proteins which are the result of convergent evolution. The napDNAbps used herein (e.g., SpCas9, Cas9 variant, or Cas9 equivalents) may also contain various modifications that alter/enhance their PAM specificities. Lastly, the application contemplates any Cas9, Cas9 variant, or Cas9 equivalent which has at least 70%, at least 75%, at least 80%, at least 85%, at least 90%, at least 91%, at least 92%, at least 93%, at least 94%, at least 95%, at least 96%, at least 97%, at least 98%, at least 99%, or at least 99.9% sequence identity to a reference Cas9 sequence, such as a references SpCas9 canonical sequences or a reference Cas9 equivalent (e.g., Cas12a/Cpf1).

[0454] In a particular embodiment, the Cas9 variant having expanded PAM capabilities is SpCas9 (H840A) VRQR (SEQ ID NO: 98), which has the following amino acid sequence (with the V, R, Q, R substitutions relative to the SpCas9 (H840A) of SEQ ID NO: 68 being show in bold underline. In addition, the methionine residue in SpCas9 (H840) was removed for SpCas9 (H840A) VRQR)

(SEQ ID NO: 98)
DKKYSIGLDIGTNSVGWAVITDEYKVPSKKFKVLGNTDRHSIKKNLIGAL
LFDSGETAEATRLKRTARRRYTRRKNRICYLQEIFSNEMAKVDDSFFHRL
EESFLVEEDKKHERHPIFGNIVDEVAYHEKYPTIYHLRKKLVDSTDKADL
RLIYLALAHMIKFRGHFLIEGDLNPDNSDVDKLFIQLVQTYNQLFEENPI
NASGVDAKAILSARLSKSRRLENLIAQLPGEKKNGLFGNLIALSLGLTPN
FKSNFDLAEDAKLQLSKDTYDDDLDNLLAQIGDQYADLFLAAKNLSDAIL
LSDILRVNTEITKAPLSASMIKRYDEHHQDLTLLKALVRQQLPEKYKEIF
FDQSKNGYAGYIDGGASQEEFYKFIKPILEKMDGTEELLVKLNREDLLRK
QRTFDNGSIPHQIHLGELHAILRRQEDFYPFLKDNREKIEKILTFRIPYY
VGPLARGNSRFAWMTRKSEETITPWNFEEVVDKGASAQSFIERMTNFDKN
LPNEKVLPKHSLLYEYFTVYNELTKVKYVTEGMRKPAFLSGEQKKAIVDL
LFKTNRKVTVKQLKEDYFKKIECFDSVEISGVEDRFNASLGTYHDLLKII
KDKDFLDNEENEDILEDIVLTLTLFEDREMIEERLKTYAHLFDDKVMKQL
KRRRYTGWGRLSRKLINGIRDKQSGKTILDFLKSDGFANRNFMQLIHDDS
LTFKEDIQKAQVSGQGDSLHEHIANLAGSPAIKKGILQTVKVVDELVKVM
GRHKPENIVIEMARENQTTQKGQKNSRERMKRIEEGIKELGSQILKEHPV
ENTQLQNEKLYLYYLQNGRDMYVDQELDINRLSDYDVDAIVPQSFLKDDS
IDNKVLTRSDKNRGKSDNVPSEEVVKKMKNYWRQLLNAKLITQRKFDNLT
KAERGGLSELDKAGFIKRQLVETRQITKHVAQILDSRMNTKYDENDKLIR
EVKVITLKSKLVSDFRKDFQFYKVREINNYHHAHDAYLNAVVGTALIKKY
PKLESEFVYGDYKVYDVRKMIAKSEQEIGKATAKYFFYSNIMNFFKTEIT
LANGEIRKRPLIETNGETGEIVWDKGRDFATVRKVLSMPQVNIVKKTEVQ
TGGFSKESILPKRNSDKLIARKKDWDPKKYGGFVSPTVAYSVLVVAKVEK
GKSKKLKSVKELLGITIMERSSFEKNPIDFLEAKGYKEVKKDLIIKLPKY
SLFELENGRKRMLASARELQKGNELALPSKYVNFLYLASHYEKLKGSPED
NEQKQLFVEQHKHYLDEIIEQISEFSKRVILADANLDKVLSAYNKHRDKP
IREQAENIIHLFTLTNLGAPAAFKYFDTTIDRKQYRSTKEVLDATLIHQS
ITGLYETRIDLSQLGGD

[0455] In another particular embodiment, the Cas9 variant having expanded PAM capabilities is SpCas9 (H840A) VRER, which has the following amino acid sequence (with the V, R, E, R substitutions relative to the SpCas9 (H840A) of SEQ ID NO: 68 being shown in bold underline. In addition, the methionine residue in SpCas9 (H840) was removed for SpCas9 (H840A) VRER):

(SEQ ID NO: 99)
DKKYSIGLDIGTNSVGWAVITDEYKVPSKKFKVLGNTDRHSIKKNLIGAL
LFDSGETAEATRLKRTARRRYTRRKNRICYLQEIFSNEMAKVDDSFFHRL
EESFLVEEDKKHERHPIFGNIVDEVAYHEKYPTIYHLRKKLVDSTDKADL
RLIYLALAHMIKFRGHFLIEGDLNPDNSDVDKLFIQLVQTYNQLFEENPI
NASGVDAKAILSARLSKSRRLENLIAQLPGEKKNGLFGNLIALSLGLTPN
FKSNFDLAEDAKLQLSKDTYDDDLDNLLAQIGDQYADLFLAAKNLSDAIL
LSDILRVNTEITKAPLSASMIKRYDEHHQDLTLLKALVRQQLPEKYKEIF
FDQSKNGYAGYIDGGASQEEFYKFIKPILEKMDGTEELLVKLNREDLLRK
QRTFDNGSIPHQIHLGELHAILRRQEDFYPFLKDNREKIEKILTFRIPYY
VGPLARGNSRFAWMTRKSEETITPWNFEEVVDKGASAQSFIERMTNFDKN
LPNEKVLPKHSLLYEYFTVYNELTKVKYVTEGMRKPAFLSGEQKKAIVDL
LFKTNRKVTVKQLKEDYFKKIECFDSVEISGVEDRFNASLGTYHDLLKII
KDKDFLDNEENEDILEDIVLTLTLFEDREMIEERLKTYAHLFDDKVMKQL
KRRRYTGWGRLSRKLINGIRDKQSGKTILDFLKSDGFANRNFMQLIHDDS
LTFKEDIQKAQVSGQGDSLHEHIANLAGSPAIKKGILQTVKVVDELVKVM
GRHKPENIVIEMARENQTTQKGQKNSRERMKRIEEGIKELGSQILKEHPV
ENTQLQNEKLYLYYLQNGRDMYVDQELDINRLSDYDVDAIVPQSFLKDDS
IDNKVLTRSDKNRGKSDNVPSEEVVKKMKNYWRQLLNAKLITQRKFDNLT
KAERGGLSELDKAGFIKRQLVETRQITKHVAQILDSRMNTKYDENDKLIR
EVKVITLKSKLVSDFRKDFQFYKVREINNYHHAHDAYLNAVVGTALIKKY
PKLESEFVYGDYKVYDVRKMIAKSEQEIGKATAKYFFYSNIMNFFKTEIT
LANGEIRKRPLIETNGETGEIVWDKGRDFATVRKVLSMPQVNIVKKTEVQ
TGGFSKESILPKRNSDKLIARKKDWDPKKYGGFVSPTVAYSVLVVAKVEK
GKSKKLKSVKELLGITIMERSSFEKNPIDFLEAKGYKEVKKDLIIKLPKY
SLFELENGRKRMLASARELQKGNELALPSKYVNFLYLASHYEKLKGSPED
NEQKQLFVEQHKHYLDEIIEQISEFSKRVILADANLDKVLSAYNKHRDKP
IREQAENIIHLFTLTNLGAPAAFKYFDTTIDRKEYRSTKEVLDATLIHQS
ITGLYETRIDLSQLGGD

[0456] In some embodiments, the napDNAbp that functions with a non-canonical PAM sequence is an Argonaute protein. One example of such a nucleic acid programmable DNA binding protein is an Argonaute protein from Natronobacterium gregoryi (NgAgo). NgAgo is a ssDNA-guided endonuclease. NgAgo binds 5′ phosphorylated ssDNA of ˜24 nucleotides (gDNA) to guide it to its target site and will make DNA double-strand breaks at the gDNA site. In contrast to Cas9, the NgAgo-gDNA system does not require a protospacer-adjacent motif (PAM). Using a nuclease inactive NgAgo (dNgAgo) can greatly expand the bases that may be targeted. The characterization and use of NgAgo have been described in Gao et al., Nat Biotechnol., 2016 July; 34(7):768-73. PubMed PMID: 27136078; Swarts et al., Nature. 507(7491) (2014):258-61; and Swarts et al., Nucleic Acids Res. 43(10) (2015):5120-9, each of which is incorporated herein by reference.

[0457] In some embodiments, the napDNAbp is a prokaryotic homolog of an Argonaute protein. Prokaryotic homologs of Argonaute proteins are known and have been described, for example, in Makarova K., et al., “Prokaryotic homologs of Argonaute proteins are predicted to function as key components of a novel system of defense against mobile genetic elements”, Biol Direct. 2009 Aug. 25; 4:29. doi: 10.1186/1745-6150-4-29, the entire contents of which is hereby incorporated by reference. In some embodiments, the napDNAbp is a Marinitoga piezophila Argonaute (MpAgo) protein. The CRISPR-associated Marinitoga piezophila Argonaute (MpAgo) protein cleaves single-stranded target sequences using 5′-phosphorylated guides. The 5′ guides are used by all known Argonautes. The crystal structure of an MpAgo-RNA complex shows a guide strand binding site comprising residues that block 5′ phosphate interactions. This data suggests the evolution of an Argonaute subclass with noncanonical specificity for a 5′-hydroxylated guide. See, e.g., Kaya et al., “A bacterial Argonaute with noncanonical guide RNA specificity”, Proc Natl Acad Sci USA. 2016 Apr. 12; 113(15):4057-62, the entire contents of which are hereby incorporated by reference). It should be appreciated that other Argonaute proteins may be used, and are within the scope of this disclosure.

[0458] Some aspects of the disclosure provide Cas9 domains that have different PAM specificities. Typically, Cas9 proteins, such as Cas9 from S. pyogenes (spCas9), require a canonical NGG PAM sequence to bind a particular nucleic acid region. This may limit the ability to edit desired bases within a genome. In some embodiments, the base editing fusion proteins provided herein may need to be placed at a precise location, for example where a target base is placed within a 4 base region (e.g., a “editing window”), which is approximately 15 bases upstream of the PAM. See Komor, A. C., et al., “Programmable editing of a target base in genomic DNA without double-stranded DNA cleavage” Nature 533, 420-424 (2016), the entire contents of which are hereby incorporated by reference. Accordingly, in some embodiments, any of the fusion proteins provided herein may contain a Cas9 domain that is capable of binding a nucleotide sequence that does not contain a canonical (e.g., NGG) PAM sequence. Cas9 domains that bind to non-canonical PAM sequences have been described in the art and would be apparent to the skilled artisan. For example, Cas9 domains that bind non-canonical PAM sequences have been described in Kleinstiver, B. P., et al., “Engineered CRISPR-Cas9 nucleases with altered PAM specificities” Nature 523, 481-485 (2015); and Kleinstiver, B. P., et al., “Broadening the targeting range of Staphylococcus aureus CRISPR-Cas9 by modifying PAM recognition” Nature Biotechnology 33, 1293-1298 (2015); the entire contents of each are hereby incorporated by reference.

[0459] For example, a napDNAbp domain with altered PAM specificity, such as a domain with at least 80%, at least 85%, at least 90%, at least 95%, or at least 99% sequence identity with wild type Francisella novicida Cpf1 (D917, E1006, and D1255) (SEQ ID NO: 100), which has the following amino acid sequence:

(SEQ ID NO: 100)
MSIYQEFVNKYSLSKTLRFELIPQGKTLENIKARGLILDDEKRAKDYKKA
KQIIDKYHQFFIEEILSSVCISEDLLQNYSDVYFKLKKSDDDNLQKDFKS
AKDTIKKQISEYIKDSEKFKNLFNQNLIDAKKGQESDLILWLKQSKDNGI
ELFKANSDITDIDEALEIIKSFKGWTTYFKGFHENRKNVYSSNDIPTSII
YRIVDDNLPKFLENKAKYESLKDKAPEAINYEQIKKDLAEELTFDIDYKT
SEVNQRVFSLDEVFEIANFNNYLNQSGITKFNTIIGGKFVNGENTKRKGI
NEYINLYSQQINDKTLKKYKMSVLFKQILSDTESKSFVIDKLEDDSDVVT
TMQSFYEQIAAFKTVEEKSIKETLSLLFDDLKAQKLDLSKIYFKNDKSLT
DLSQQVFDDYSVIGTAVLEYITQQIAPKNLDNPSKKEQELIAKKTEKAKY
LSLETIKLALEEFNKHRDIDKQCRFEEILANFAAIPMIFDEIAQNKDNLA
QISIKYQNQGKKDLLQASAEDDVKAIKDLLDQTNNLLHKLKIFHISQSED
KANILDKDEHFYLVFEECYFELANIVPLYNKIRNYITQKPYSDEKFKLNF
ENSTLANGWDKNKEPDNTAILFIKDDKYYLGVMNKKNNKIFDDKAIKENK
GEGYKKIVYKLLPGANKMLPKVFFSAKSIKFYNPSEDILRIRNHSTHTKN
GSPQKGYEKFEFNIEDCRKFIDFYKQSISKHPEWKDFGFRFSDTQRYNSI
DEFYREVENQGYKLTFENISESYIDSVVNQGKLYLFQIYNKDFSAYSKGR
PNLHTLYWKALFDERNLQDVVYKLNGEAELFYRKQSIPKKITHPAKEAIA
NKNKDNPKKESVFEYDLIKDKRFTEDKFFFHCPITINFKSSGANKFNDEI
NLLLKEKANDVHILSIDRGERHLAYYTLVDGKGNIIKQDTFNIIGNDRMK
TNYHDKLAAIEKDRDSARKDWKKINNIKEMKEGYLSQVVHEIAKLVIEYN
AIVVFEDLNFGFKRGRFKVEKQVYQKLEKMLIEKLNYLVFKDNEFDKTGG
VLRAYQLTAPFETFKKMGKQTGIIYYVPAGFTSKICPVTGFVNQLYPKYE
SVSKSQEFFSKFDKICYNLDKGYFEFSFDYKNFGDKAAKGKWTIASFGSR
LINFRNSDKNHNWDTREVYPTKELEKLLKDYSIEYGHGECIKAAICGESD
KKFFAKLTSVLNTILQMRNSKTGTELDYLISPVADVNGNFFDSRQAPKNM
PQDADANGAYHIGLKGLMLLGRIKNNQEGKKLNLVIKNEEYFEFVQNRNN

[0460] An additional napDNAbp domain with altered PAM specificity, such as a domain having at least 80%, at least 85%, at least 90%, at least 95%, or at least 99% sequence identity with wild type Geobacillus thermodenitrificans Cas9 (SEQ ID NO: 55). In some embodiments, the nucleic acid programmable DNA binding protein (napDNAbp) is a nucleic acid programmable DNA binding protein that does not require a canonical (NGG) PAM sequence. In some embodiments, the napDNAbp is an Argonaute protein. One example of such a nucleic acid programmable DNA binding protein is an Argonaute protein from Natronobacterium gregoryi (NgAgo). NgAgo is a ssDNA-guided endonuclease. NgAgo binds 5′ phosphorylated ssDNA of ˜24 nucleotides (gDNA) to guide it to its target site and will make DNA double-strand breaks at the gDNA site. In contrast to Cas9, the NgAgo-gDNA system does not require a protospacer-adjacent motif (PAM). Using a nuclease inactive NgAgo (dNgAgo) can greatly expand the bases that may be targeted. The characterization and use of NgAgo have been described in Gao et al., Nat Biotechnol., 34(7): 768-73 (2016), PubMed PMID: 27136078; Swarts et al., Nature, 507(7491): 258-61 (2014); and Swarts et al., Nucleic Acids Res. 43(10) (2015): 5120-9, each of which is incorporated herein by reference. The sequence of Natronobacterium gregoryi Argonaute is provided in SEQ ID NO: 101.

[0461] The disclosed fusion proteins may comprise a napDNAbp domain having at least 80%, at least 85%, at least 90%, at least 95%, or at least 99% sequence identity with wild type Natronobacterium gregoryi Argonaute (SEQ ID NO: 101), which has the following amino acid sequence:

(SEQ ID NO: 101)
MTVIDLDSTTTADELTSGHTYDISVTLTGVYDNTDEQHPRMSLAFEQDNG
ERRYITLWKNTTPKDVFTYDYATGSTYIFTNIDYEVKDGYENLTATYQTT
VENATAQEVGTTDEDETFAGGEPLDHHLDDALNETPDDAETESDSGHVMT
SFASRDQLPEWTLHTYTLTATDGAKTDTEYARRTLAYTVRQELYTDHDAA
PVATDGLMLLTPEPLGETPLDLDCGVRVEADETRTLDYTTAKDRLLAREL
VEEGLKRSLWDDYLVRGIDEVLSKEPVLTCDEFDLHERYDLSVEVGHSGR
AYLHINFRHRFVPKLTLADIDDDNIYPGLRVKTTYRPRRGHIVWGLRDEC
ATDSLNTLGNQSVVAYHRNNQTPINTDLLDAIEAADRRVVETRRQGHGDD
AVSFPQELLAVEPNTHQIKQFASDGFHQQARSKTRLSASRCSEKAQAFAE
RLDPVRLNGSTVEFSSEFFTGNNEQQLRLLYENGESVLTFRDGARGAHPD
ETFSKGIVNPPESFEVAVVLPEQQADTCKAQWDTMADLLNQAGAPPTRSE
TVQYDAFSSPESISLNVAGAIDPSEVDAAFVVLPPDQEGFADLASPTETY
DELKKALANMGIYSQMAYFDRFRDAKIFYTRNVALGLLAAAGGVAFTTEH
AMPGDADMFIGIDVSRSYPEDGASGQINIAATATAVYKDGTILGHSSTRP
QLGEKLQSTDVRDIMKNAILGYQQVTGESPTHIVIHRDGFMNEDLDPATE
FLNEQGVEYDIVEIRKQPQTRLLAVSDVQYDTPVKSIAAINQNEPRATVA
TFGAPEYLATRDGGGLPRPIQIERVAGETDIETLTRQVYLLSQSHIQVHN
STARLPITTAYADQASTHATKGYLVQTGAFESNVGFL

[0462] In addition, any available methods may be utilized to obtain or construct a variant or mutant Cas9 protein. The term “mutation,” as used herein, refers to a substitution of a residue within a sequence, e.g., a nucleic acid or amino acid sequence, with another residue, or a deletion or insertion of one or more residues within a sequence. Mutations are typically described herein by identifying the original residue followed by the position of the residue within the sequence and by the identity of the newly substituted residue. Various methods for making the amino acid substitutions (mutations) provided herein are well known in the art, and are provided by, for example, Green and Sambrook, Molecular Cloning: A Laboratory Manual (4th ed., Cold Spring Harbor Laboratory Press, Cold Spring Harbor, N.Y. (2012)). Mutations can include a variety of categories, such as single base polymorphisms, microduplication regions, indel, and inversions, and is not meant to be limiting in any way. Mutations can include “loss-of-function” mutations which is the normal result of a mutation that reduces or abolishes a protein activity. Most loss-of-function mutations are recessive, because in a heterozygote the second chromosome copy carries an unmutated version of the gene coding for a fully functional protein whose presence compensates for the effect of the mutation. Mutations also embrace “gain-of-function” mutations, which is one which confers an abnormal activity on a protein or cell that is otherwise not present in a normal condition. Many gain-of-function mutations are in regulatory sequences rather than in coding regions, and can therefore have a number of consequences. For example, a mutation might lead to one or more genes being expressed in the wrong tissues, these tissues gaining functions that they normally lack. Because of their nature, gain-of-function mutations are usually dominant.

[0463] Mutations can be introduced into a reference Cas9 protein using site-directed mutagenesis. Older methods of site-directed mutagenesis known in the art rely on sub-cloning of the sequence to be mutated into a vector, such as an M13 bacteriophage vector, that allows the isolation of single-stranded DNA template. In these methods, one anneals a mutagenic primer (i.e., a primer capable of annealing to the site to be mutated but bearing one or more mismatched nucleotides at the site to be mutated) to the single-stranded template and then polymerizes the complement of the template starting from the 3′ end of the mutagenic primer. The resulting duplexes are then transformed into host bacteria and plaques are screened for the desired mutation. More recently, site-directed mutagenesis has employed PCR methodologies, which have the advantage of not requiring a single-stranded template. In addition, methods have been developed that do not require sub-cloning. Several issues must be considered when PCR-based site-directed mutagenesis is performed. First, in these methods it is desirable to reduce the number of PCR cycles to prevent expansion of undesired mutations introduced by the polymerase. Second, a selection must be employed in order to reduce the number of non-mutated parental molecules persisting in the reaction. Third, an extended-length PCR method is preferred in order to allow the use of a single PCR primer set. And fourth, because of the non-template-dependent terminal extension activity of some thermostable polymerases it is often necessary to incorporate an end-polishing step into the procedure prior to blunt-end ligation of the PCR-generated mutant product.

[0464] Mutations may also be introduced by directed evolution processes, such as phage-assisted continuous evolution (PACE) or phage-assisted noncontinuous evolution (PANCE). The term “phage-assisted continuous evolution (PACE),” as used herein, refers to continuous evolution that employs phage as viral vectors. The general concept of PACE technology has been described, for example, in International PCT Application, PCT/US2009/056194, filed Sep. 8, 2009, published as WO 2010/028347 on Mar. 11, 2010; International PCT Application, PCT/US2011/066747, filed Dec. 22, 2011, published as WO 2012/088381 on Jun. 28, 2012; U.S. Application, U.S. Pat. No. 9,023,594, issued May 5, 2015, International PCT Application, PCT/US2015/012022, filed Jan. 20, 2015, published as WO 2015/134121 on Sep. 11, 2015, and International PCT Application, PCT/US2016/027795, filed Apr. 15, 2016, published as WO 2016/168631 on Oct. 20, 2016, the entire contents of each of which are incorporated herein by reference. Variant Cas9s may also be obtain by phage-assisted non-continuous evolution (PANCE),” which as used herein, refers to non-continuous evolution that employs phage as viral vectors. PANCE is a simplified technique for rapid in vivo directed evolution using serial flask transfers of evolving ‘selection phage’ (SP), which contain a gene of interest to be evolved, across fresh E. coli host cells, thereby allowing genes inside the host E. coli to be held constant while genes contained in the SP continuously evolve. Serial flask transfers have long served as a widely-accessible approach for laboratory evolution of microbes, and, more recently, analogous approaches have been developed for bacteriophage evolution. The PANCE system features lower stringency than the PACE system.

[0465] Any of the references noted above which relate to Cas9 or Cas9 equivalents are hereby incorporated by reference in their entireties, if not already stated so.

J. Divided napDNAbp Domains for Split PE Delivery

[0466] In various embodiments, the prime editors described herein may be delivered to cells as two or more fragments which become assembled inside the cell (either by passive assembly, or by active assembly, such as using split intein sequences) into a reconstituted prime editor. In some cases, the self assembly may be passive whereby the two or more prime editor fragments associate inside the cell covalently or non-covalently to reconstitute the prime editor. In other cases, the self-assembly may be catalyzed by dimerization domains installed on each of the fragments. Examples of dimerization domains are described herein. In still other cases, the self-assembly may be catalyzed by split intein sequences installed on each of the prime editor fragments.

[0467] Split PE delivery may be advantageous to address various size constraints of different delivery approaches. For example, delivery approaches may include virus-based delivery methods, messenger RNA-based delivery methods, or RNP-based delivery (ribonucleoprotein-based delivery). And, each of these methods of delivery may be more efficient and/or effective by dividing up the prime editor into smaller pieces. Once inside the cell, the smaller pieces can assemble into a functional prime editor. Depending on the means of splitting, the divided prime editor fragments can be reassembled in a non-covalent manner or a covalent manner to reform the prime editor. In one embodiment, the prime editor can be split at one or more split sites into two or more fragments. The fragments can be unmodified (other than being split). Once the fragments are delivered to the cell (e.g., by direct delivery of a ribonucleoprotein complex or by nucleic delivery—e.g., mRNA delivery or virus vector based delivery), the fragments can reassociate covalently or non-covalently to reconstitute the prime editor. In another embodiment, the prime editor can be split at one or more split sites into two or more fragments. Each of the fragments can be modified to comprise a dimerization domain, whereby each fragment that is formed is coupled to a dimerization domain. Once delivered or expressed within a cell, the dimerization domains of the different fragments associate and bind to one another, bringing the different prime editor fragments together to reform a functional prime editor. In yet another embodiment, the prime editor fragment may be modified to comprise a split intein. Once delivered or expressed within a cell, the split intein domains of the different fragments associate and bind to one another, and then undergo trans-splicing, which results in the excision of the split-intein domains from each of the fragments, and a concomitant formation of a peptide bond between the fragments, thereby restoring the prime editor.

[0468] In one embodiment, the prime editor can be delivered using a split-intein approach.

[0469] The location of the split site can be positioned between any one or more pair of residues in the prime editor and in any domains therein, including within the napDNAbp domain, the polymerase domain (e.g., RT domain), linker domain that joins the napDNAbp domain and the polymerase domain.

[0470] In one embodiment, depicted in FIG. 66, the prime editor (PE) is divided at a split site within the napDNAbp.

[0471] In certain embodiments, the napDNAbp is a canonical SpCas9 polypeptide of SEQ ID NO: 37. In certain embodiments, the SpCas9 is split into two fragments at a split site located between residues 1 and 2, or 2 and 3, or 3 and 4, or 4 and 5, or 5 and 6, or 6 and 7, or 7 and 8, or 8 and 9, or 9 and 10, or between any two pair of residues located anywhere between residues 1-10, 10-20, 20-30, 30-40, 40-50, 50-60, 60-70, 70-80, 80-90, 90-100, 100-200, 200-300, 300-400, 400-500, 500-600, 600-700, 700-800, 800-900, 1000-1100, 1100-1200, 1200-1300, or 1300-1368 of canonical SpCas9 of SEQ ID NO: 37.

[0472] In certain embodiments, a napDNAbp is split into two fragments at a split site that is located at a pair of residue that corresponds to any two pair of residues located anywhere between positions 1-10, 10-20, 20-30, 30-40, 40-50, 50-60, 60-70, 70-80, 80-90, 90-100, 100-200, 200-300, 300-400, 400-500, 500-600, 600-700, 700-800, 800-900, 1000-1100, 1100-1200, 1200-1300, or 1300-1368 of canonical SpCas9 of SEQ ID NO: 37.

[0473] In certain embodiments, the SpCas9 is split into two fragments at a split site located between residues 1 and 2, or 2 and 3, or 3 and 4, or 4 and 5, or 5 and 6, or 6 and 7, or 7 and 8, or 8 and 9, or 9 and 10, or between any two pair of residues located anywhere between residues 1-10, 10-20, 20-30, 30-40, 40-50, 50-60, 60-70, 70-80, 80-90, 90-100, 100-200, 200-300, 300-400, 400-500, 500-600, 600-700, 700-800, 800-900, 1000-1100, 1100-1200, 1200-1300, or 1300-1368 of canonical SpCas9 of SEQ ID NO: 37. In certain embodiments, the split site is located one or more polypeptide bond sites (i.e., a “split site or split-intein split site”), fused to a split intein, and then delivered to cells as separately-encoded fusion proteins. Once the split-intein fusion proteins (i.e., protein halves) are expressed within a cell, the proteins undergo trans-splicing to form a complete or whole PE with the concomitant removal of the joined split-intein sequences.

[0474] For example, as shown in FIG. 66, the N-terminal extein can be fused to a first split-intein (e.g., N intein) and the C-terminal extein can be fused to a second split-intein (e.g., C intein). The N-terminal extein becomes fused to the C-terminal extein to reform a whole prime editor comprising an napDNAbp domain and a polymerase domain (e.g., RT domain) upon the self-association of the N intein and the C intein inside the cell, followed by their self-excision, and the concomitant formation of a peptide bond between the N-terminal extein and C-terminal extein portions of a whole prime editor (PE).

[0475] To take advantage of a split-PE delivery strategy using split-inteins, the prime editor needs to be divided at one or more split sites to create at least two separate halves of a prime editor, each of which may be rejoined inside a cell if each half is fused to a split-intein sequence.

[0476] In certain embodiments, the prime editor is split at a single split site. In certain other embodiments, the prime editor is split at two split sites, or three split sites, or four split sites, or more.

[0477] In a preferred embodiment, the prime editor is split at a single split site to create two separate halves of a prime editor, each of which can be fused to a split intein sequence

[0478] An exemplary split intein is the Ssp DnaE intein, which comprises two subunits, namely, DnaE-N and DnaE-C. The two different subunits are encoded by separate genes, namely dnaE-n and dnaE-c, which encode the DnaE-N and DnaE-C subunits, respectively. DnaE is a naturally occurring split intein in Synechocytis sp. PCC6803 and is capable of directing trans-splicing of two separate proteins, each comprising a fusion with either DnaE-N or DnaE-C.

[0479] Additional naturally occurring or engineered split-intein sequences are known in the or can be made from whole-intein sequences described herein or those available in the art. Examples of split-intein sequences can be found in Stevens et al., “A promiscuous split intein with expanded protein engineering applications,” PNAS, 2017, Vol. 114: 8538-8543; Iwai et al., “Highly efficient protein trans-splicing by a naturally split DnaE intein from Nostoc punctiforme, FEBS Lett, 580: 1853-1858, each of which are incorporated herein by reference. Additional split intein sequences can be found, for example, in WO 2013/045632, WO 2014/055782, WO 2016/069774, and EP2877490, the contents each of which are incorporated herein by reference.

[0480] In addition, protein splicing in trans has been described in vivo and in vitro (Shingledecker, et al., Gene 207:187 (1998), Southworth, et al., EMBO J. 17:918 (1998); Mills, et al., Proc. Natl. Acad. Sci. USA, 95:3543-3548 (1998); Lew, et al., J. Biol. Chem., 273:15887-15890 (1998); Wu, et al., Biochim. Biophys. Acta 35732:1 (1998b), Yamazaki, et al., J. Am. Chem. Soc. 120:5591 (1998), Evans, et al., J. Biol. Chem. 275:9091 (2000); Otomo, et al., Biochemistry 38:16040-16044 (1999); Otomo, et al., J. Biolmol. NMR 14:105-114 (1999); Scott, et al., Proc. Natl. Acad. Sci. USA 96:13638-13643 (1999)) and provides the opportunity to express a protein as to two inactive fragments that subsequently undergo ligation to form a functional product, e.g., as shown in FIGS. 66 and 67 with regard to the formation of a complete Prime editor from two separately-expressed halves.

[0481] In various embodiments described herein, the continuous evolution methods (e.g., PACE) may be used to evolve a first portion of a base editor. A first portion could include a single component or domain, e.g., a Cas9 domain, a deaminase domain, or a UGI domain. The separately evolved component or domain can be then fused to the remaining portions of the base editor within a cell by separately express both the evolved portion and the remaining non-evolved portions with split-intein polypeptide domains. The first portion could more broadly include any first amino acid portion of a base editor that is desired to be evolved using a continuous evolution method described herein. The second portion would in this embodiment refer to the remaining amino acid portion of the base editor that is not evolved using the herein methods. The evolved first portion and the second portion of the base editor could each be expressed with split-intein polypeptide domains in a cell. The natural protein splicing mechanisms of the cell would reassemble the evolved first portion and the non-evolved second portion to form a single fusion protein evolved base editor. The evolved first portion may comprise either the N- or C-terminal part of the single fusion protein. In an analogous manner, use of a second orthogonal trans-splicing intein pair could allow the evolved first portion to comprise an internal part of the single fusion protein.

[0482] Thus, any of the evolved and non-evolved components of the base editors herein described may be expressed with split-intein tags in order to facilitate the formation of a complete base editor comprising the evolved and non-evolved component within a cell.

[0483] The mechanism of the protein splicing process has been studied in great detail (Chong, et al., J. Biol. Chem. 1996, 271, 22159-22168; Xu, M-Q & Perler, F. B. EMBO Journal, 1996, 15, 5146-5153) and conserved amino acids have been found at the intein and extein splicing points (Xu, et al., EMBO Journal, 1994, 13 5517-522). The constructs described herein contain an intein sequence fused to the 5′-terminus of the first gene (e.g., the evolved portion of the base editor). Suitable intein sequences can be selected from any of the proteins known to contain protein splicing elements. A database containing all known inteins can be found on the World Wide Web (Perler, F. B. Nucleic Acids Research, 1999, 27, 346-347). The intein sequence is fused at the 3′ end to the 5′ end of a second gene. For targeting of this gene to a certain organelle, a peptide signal can be fused to the coding sequence of the gene. After the second gene, the intein-gene sequence can be repeated as often as desired for expression of multiple proteins in the same cell. For multi-intein containing constructs, it may be useful to use intein elements from different sources. After the sequence of the last gene to be expressed, a transcription termination sequence must be inserted. In one embodiment, a modified intein splicing unit is designed so that it can both catalyze excision of the exteins from the inteins as well as prevent ligation of the exteins. Mutagenesis of the C-terminal extein junction in the Pyrococcus species GB-D DNA polymerase was found to produce an altered splicing element that induces cleavage of exteins and inteins but prevents subsequent ligation of the exteins (Xu, M-Q & Perler, F. B. EMBO Journal, 1996, 15, 5146-5153). Mutation of serine 538 to either an alanine or glycine induced cleavage but prevented ligation. Mutation of equivalent residues in other intein splicing units should also prevent extein ligation due to the conservation of amino acids at the C-terminal extein junction to the intein. A preferred intein not containing an endonuclease domain is the Mycobacterium xenopi GyrA protein (Telenti, et al. J. Bacteriol. 1997, 179, 6378-6382). Others have been found in nature or have been created artificially by removing the endonuclease domains from endonuclease containing inteins (Chong, et al. J. Biol. Chem. 1997, 272, 15587-15590). In a preferred embodiment, the intein is selected so that it consists of the minimal number of amino acids needed to perform the splicing function, such as the intein from the Mycobacterium xenopi GyrA protein (Telenti, A., et al., J. Bacteriol. 1997, 179, 6378-6382). In an alternative embodiment, an intein without endonuclease activity is selected, such as the intein from the Mycobacterium xenopi GyrA protein or the Saccharomyces cerevisiae VMA intein that has been modified to remove endonuclease domains (Chong, 1997). Further modification of the intein splicing unit may allow the reaction rate of the cleavage reaction to be altered allowing protein dosage to be controlled by simply modifying the gene sequence of the splicing unit.

[0484] Inteins can also exist as two fragments encoded by two separately transcribed and translated genes. These so-called split inteins self-associate and catalyze protein-splicing activity in trans. Split inteins have been identified in diverse cyanobacteria and archaea (Caspi et al, Mol Microbiol. 50: 1569-1577 (2003); Choi J. et al, J Mol Biol. 556: 1093-1106 (2006.); Dassa B. et al, Biochemistry. 46:322-330 (2007.); Liu X. and Yang J., J Biol Chem. 275:26315-26318 (2003); Wu H. et al.

[0485] Proc Natl Acad Sci USA. £5:9226-9231 (1998.); and Zettler J. et al, FEBS Letters. 553:909-914 (2009)), but have not been found in eukaryotes thus far. Recently, a bioinformatic analysis of environmental metagenomic data revealed 26 different loci with a novel genomic arrangement. At each locus, a conserved enzyme coding region is interrupted by a split intein, with a freestanding endonuclease gene inserted between the sections coding for intein subdomains. Among them, five loci were completely assembled: DNA helicases (gp41-1, gp41-8); Inosine-5′-monophosphate dehydrogenase (IMPDH-1); and Ribonucleotide reductase catalytic subunits (NrdA-2 and NrdJ-1). This fractured gene organization appears to be present mainly in phages (Dassa et al, Nucleic Acids Research. 57:2560-2573 (2009)).

[0486] The split intein Npu DnaE was characterized as having the highest rate reported for the protein trans-splicing reaction. In addition, the Npu DnaE protein splicing reaction is considered robust and high-yielding with respect to different extein sequences, temperatures from 6 to 37° C., and the presence of up to 6M Urea (Zettler J. et al, FEBS Letters. 553:909-914 (2009); Iwai I. et al, FEBS Letters 550: 1853-1858 (2006)). As expected, when the Cysl Ala mutation at the N-domain of these inteins was introduced, the initial N to S-acyl shift and therefore protein splicing was blocked. Unfortunately, the C-terminal cleavage reaction was also almost completely inhibited. The dependence of the asparagine cyclization at the C-terminal splice junction on the acyl shift at the N-terminal scissile peptide bond seems to be a unique property common to the naturally split DnaE intein alleles (Zettler J. et al. FEBS Letters. 555:909-914 (2009)).

[0487] The mechanism of protein splicing typically has four steps [29-30]: 1) an N—S or N—O acyl shift at the intein N-terminus, which breaks the upstream peptide bond and forms an ester bond between the N-extein and the side chain of the intein's first amino acid (Cys or Ser); 2) a transesterification relocating the N-extein to the intein C-terminus, forming a new ester bond linking the N-extein to the side chain of the C-extein's first amino acid (Cys, Ser, or Thr); 3) Asn cyclization breaking the peptide bond between the intein and the C-extein; and 4) a S—N or O—N acyl shift that replaces the ester bond with a peptide bond between the N-extein and C-extein.

[0488] Protein trans-splicing, catalyzed by split inteins, provides an entirely enzymatic method for protein ligation [31]. A split-intein is essentially a contiguous intein (e.g. a mini-intein) split into two pieces named N-intein and C-intein, respectively. The N-intein and C-intein of a split intein can associate non-covalently to form an active intein and catalyze the splicing reaction essentially in same way as a contiguous intein does. Split inteins have been found in nature and also engineered in laboratories [31-35]. As used herein, the term “split intein” refers to any intein in which one or more peptide bond breaks exists between the N-terminal and C-terminal amino acid sequences such that the N-terminal and C-terminal sequences become separate molecules that can non-covalently reassociate, or reconstitute, into an intein that is functional for trans-splicing reactions. Any catalytically active intein, or fragment thereof, may be used to derive a split intein for use in the methods of the invention. For example, in one aspect the split intein may be derived from a eukaryotic intein. In another aspect, the split intein may be derived from a bacterial intein. In another aspect, the split intein may be derived from an archaeal intein. Preferably, the split intein so-derived will possess only the amino acid sequences essential for catalyzing trans-splicing reactions.

[0489] As used herein, the “N-terminal split intein (In)” refers to any intein sequence that comprises an N-terminal amino acid sequence that is functional for trans-splicing reactions. An In thus also comprises a sequence that is spliced out when trans-splicing occurs. An In can comprise a sequence that is a modification of the N-terminal portion of a naturally occurring intein sequence. For example, an In can comprise additional amino acid residues and/or mutated residues so long as the inclusion of such additional and/or mutated residues does not render the In non-functional in trans-splicing. Preferably, the inclusion of the additional and/or mutated residues improves or enhances the trans-splicing activity of the In.

[0490] As used herein, the “C-terminal split intein (Ic)” refers to any intein sequence that comprises a C-terminal amino acid sequence that is functional for trans-splicing reactions. In one aspect, the Ic comprises 4 to 7 contiguous amino acid residues, at least 4 amino acids of which are from the last β-strand of the intein from which it was derived. An Ic thus also comprises a sequence that is spliced out when trans-splicing occurs. An Ic can comprise a sequence that is a modification of the C-terminal portion of a naturally occurring intein sequence. For example, an Ic can comprise additional amino acid residues and/or mutated residues so long as the inclusion of such additional and/or mutated residues does not render the In non-functional in trans-splicing. Preferably, the inclusion of the additional and/or mutated residues improves or enhances the trans-splicing activity of the Ic.

[0491] In some embodiments of the invention, a peptide linked to an Ic or an In can comprise an additional chemical moiety including, among others, fluorescence groups, biotin, polyethylene glycol (PEG), amino acid analogs, unnatural amino acids, phosphate groups, glycosyl groups, radioisotope labels, and pharmaceutical molecules. In other embodiments, a peptide linked to an Ic can comprise one or more chemically reactive groups including, among others, ketone, aldehyde, Cys residues and Lys residues. The N-intein and C-intein of a split intein can associate non-covalently to form an active intein and catalyze the splicing reaction when an “intein-splicing polypeptide (ISP)” is present. As used herein, “intein-splicing polypeptide (ISP)” refers to the portion of the amino acid sequence of a split intein that remains when the Ic, In, or both, are removed from the split intein. In certain embodiments, the In comprises the ISP. In another embodiment, the Ic comprises the ISP. In yet another embodiment, the ISP is a separate peptide that is not covalently linked to In nor to Ic.

[0492] Split inteins may be created from contiguous inteins by engineering one or more split sites in the unstructured loop or intervening amino acid sequence between the −12 conserved beta-strands found in the structure of mini-inteins [25-28]. Some flexibility in the position of the split site within regions between the beta-strands may exist, provided that creation of the split will not disrupt the structure of the intein, the structured beta-strands in particular, to a sufficient degree that protein splicing activity is lost.

[0493] In protein trans-splicing, one precursor protein consists of an N-extein part followed by the N-intein, another precursor protein consists of the C-intein followed by a C-extein part, and a trans-splicing reaction (catalyzed by the N- and C-inteins together) excises the two intein sequences and links the two extein sequences with a peptide bond. Protein trans-splicing, being an enzymatic reaction, can work with very low (e.g. micromolar) concentrations of proteins and can be carried out under physiological conditions.

### K. Other Programmable Nucleases

[0494] In various embodiments described herein, the prime editors comprise a napDNAbp, such as a Cas9 protein. These proteins are “programmable” by way of their becoming complexed with a guide RNA (or a pegRNA, as the case may be), which guides the Cas9 protein to a target site on the DNA which possess a sequence that is complementary to the spacer portion of the gRNA (or pegRNA) and also which possesses the required PAM sequence. However, in certain embodiment envisioned here, the napDNAbp may be substituted with a different type of programmable protein, such as a zinc finger nuclease or a transcription activator-like effector nuclease (TALEN).

[0495] FIG. 1J depicts such a variation of prime editing contemplated herein that replaces the napDNAbp (e.g., SpCas9 nickase) with any programmable nuclease domain, such as zinc finger nucleases (ZFN) or transcription activator-like effector nucleases (TALEN). As such, it is contemplated that suitable nucleases do not necessarily need to be “programmed” by a nucleic acid targeting molecule (such as a guide RNA), but rather, may be programmed by defining the specificity of a DNA-binding domain, such as and in particular, a nuclease. Just as in prime editing with napDNAbp moieties, it is preferable that such alternative programmable nucleases be modified such that only one strand of a target DNA is cut. In other words, the programmable nucleases should function as nickases, preferably. Once a programmable nuclease is selected (e.g., a ZFN or a TALEN), then additional functionalities may be engineered into the system to allow it to operate in accordance with a prime editing-like mechanism. For example, the programmable nucleases may be modified by coupling (e.g., via a chemical linker) an RNA or DNA extension arm thereto, wherein the extension arm comprises a primer binding site (PBS) and a DNA synthesis template. The programmable nuclease may also be coupled (e.g., via a chemical or amino acid linker) to a polymerase, the nature of which will depend upon whether the extension arm is DNA or RNA. In the case of an RNA extension arm, the polymerase can be an RNA-dependent DNA polymerase (e.g., reverse transcriptase). In the case of a DNA extension arm, the polymerase can be a DNA-dependent DNA polymerase (e.g., a prokaryotic polymerase, including Pol I, Pol II, or Pol III, or a eukaryotic polymerase, including Pol a, Pol b, Pol g, Pol d, Pol e, or Pol z). The system may also include other functionalities added as fusions to the programmable nucleases, or added in trans to facilitate the reaction as a whole (e.g., (a) a helicase to unwind the DNA at the cut site to make the cut strand with the 3′ end available as a primer, (b) a FEN1 to help remove the endogenous strand on the cut strand to drive the reaction towards replacement of the endogenous strand with the synthesized strand, or (c) a nCas9:gRNA complex to create a second site nick on the opposite strand, which may help drive the integration of the synthesize repair through favored cellular repair of the non-edited strand). In an analogous manner to prime editing with a napDNAbp, such a complex with an otherwise programmable nuclease could be used to synthesize and then install a newly synthesized replacement strand of DNA carrying an edit of interest permanently into a target site of DNA.

[0496] Suitable alternative programmable nucleases are well known in the art which may be used in place of a napDNAbp:gRNA complex to construct an alternative prime editor system that can be programmed to selectively bind a target site of DNA, and which can be further modified in the manner described above to co-localize a polymerase and an RNA or DNA extension arm comprising a primer binding site and a DNA synthesis template to specific nick site. For example, and as represented in FIG. 1J, Transcription Activator-Like Effector Nucleases (TALENs) may be used as the programmable nuclease in the prime editing methods and compositions of matter described herein. TALENS are artificial restriction enzymes generated by fusing the TAL effector DNA binding domain to a DNA cleavage domain. These reagents enable efficient, programmable, and specific DNA cleavage and represent powerful tools for genome editing in situ. Transcription activator-like effectors (TALEs) can be quickly engineered to bind practically any DNA sequence. The term TALEN, as used herein, is broad and includes a monomeric TALEN that can cleave double stranded DNA without assistance from another TALEN. The term TALEN is also used to refer to one or both members of a pair of TALENs that are engineered to work together to cleave DNA at the same site. TALENs that work together may be referred to as a left-TALEN and a right-TALEN, which references the handedness of DNA. See U.S. Ser. Nos. 12/965,590; 13/426,991 (U.S. Pat. No. 8,450,471); U.S. Ser. No. 13/427,040 (U.S. Pat. No. 8,440,431); U.S. Ser. No. 13/427,137 (U.S. Pat. No. 8,440,432); and U.S. Ser. No. 13/738,381, all of which are incorporated by reference herein in their entirety. In addition, TALENS are described in WO 2015/027134, U.S. Pat. No. 9,181,535, Boch et al., “Breaking the Code of DNA Binding Specificity of TAL-Type III Effectors”, Science, vol. 326, pp. 1509-1512 (2009), Bogdanove et al., TAL Effectors: Customizable Proteins for DNA Targeting, Science, vol. 333, pp. 1843-1846 (2011), Cade et al., “Highly efficient generation of heritable zebrafish gene mutations using homo- and heterodimeric TALENs”, Nucleic Acids Research, vol. 40, pp. 8001-8010 (2012), and Cermak et al., “Efficient design and assembly of custom TALEN and other TAL effector-based constructs for DNA targeting”, Nucleic Acids Research, vol. 39, No. 17, e82 (2011), each of which are incorporated herein by reference.

[0497] As represented in FIG. 1J, zinc finger nucleases may also be used as alternative programmable nucleases for use in prime editing in place of napDNAbps, such as Cas9 nickases. Like with TALENS, the ZFN proteins may be modified such that they function as nickases, i.e., engineering the ZFN such that it cleaves only one strand of the target DNA in a manner similar to the napDNAbp used with the prime editors described herein. ZFN proteins have been extensively described in the art, for example, in Carroll et al., “Genome Engineering with Zinc-Finger Nucleases,” Genetics, August 2011, Vol. 188: 773-782; Durai et al., “Zinc finger nucleases: custom-designed molecular scissors for genome engineering of plant and mammalian cells,” Nucleic Acids Res, 2005, Vol. 33: 5978-90; and Gaj et al., “ZFN, TALEN, and CRISPR/Cas-based methods for genome engineering,” Trends Biotechnol. 2013, Vol. 31: 397-405, each of which are incorporated herein by reference in their entireties.

### [3] Polymerases (e.g., Reverse Transcriptases)

[0498] In various embodiments, the prime editor (PE) system disclosed herein includes a polymerase (e.g., DNA-dependent DNA polymerase or RNA-dependent DNA polymerase, such as, reverse transcriptase), or a variant thereof, which can be provided as a fusion protein with a napDNAbp or other programmable nuclease, or provide in trans.

[0499] Any polymerase may be used in the prime editors disclosed herein. The polymerases may be wild type polymerases, functional fragments, mutants, variants, or truncated variants, and the like. The polymerases may include wild type polymerases from eukaryotic, prokaryotic, archaeal, or viral organisms, and/or the polymerases may be modified by genetic engineering, mutagenesis, directed evolution-based processes. The polymerases may include T7 DNA polymerase, T5 DNA polymerase, T4 DNA polymerase, Klenow fragment DNA polymerase, DNA polymerase III and the like. The polymerases may also be thermostable, and may include Taq, Tne, Tma, Pfu, Tfl, Tth, Stoffel fragment, VENT® and DEEPVENT® DNA polymerases, KOD, Tgo, JDF3, and mutants, variants and derivatives thereof (see U.S. Pat. Nos. 5,436,149; 4,889,818; 4,965,185; 5,079,352; 5,614,365; 5,374,553; 5,270,179; 5,047,342; 5,512,462; WO 92/06188; WO 92/06200; WO 96/10640; Barnes, W. M., Gene 112:29-35 (1992); Lawyer, F. C., et al., PCR Meth. Appl. 2:275-287 (1993); Flaman, J.-M, et al., Nuc. Acids Res. 22(15):3259-3260 (1994), each of which are incorporated by reference). For synthesis of longer nucleic acid molecules (e.g., nucleic acid molecules longer than about 3-5 Kb in length), at least two DNA polymerases can be employed. In certain embodiments, one of the polymerases can be substantially lacking a 3′ exonuclease activity and the other may have a 3′ exonuclease activity. Such pairings may include polymerases that are the same or different. Examples of DNA polymerases substantially lacking in 3′ exonuclease activity include, but are not limited to, Taq, Tne(exo-), Tma(exo-), Pfu(exo-), Pwo(exo-), exo-KOD and Tth DNA polymerases, and mutants, variants and derivatives thereof.

[0500] Preferably, the polymerase usable in the prime editors disclosed herein are “template-dependent” polymerase (since the polymerases are intended to rely on the DNA synthesis template to specify the sequence of the DNA strand under synthesis during prime editing. As used herein, the term “template DNA molecule” refers to that strand of a nucleic acid from which a complementary nucleic acid strand is synthesized by a DNA polymerase, for example, in a primer extension reaction of the DNA synthesis template of a pegRNA.

[0501] As used herein, the term “template dependent manner” is intended to refer to a process that involves the template dependent extension of a primer molecule (e.g., DNA synthesis by DNA polymerase). The term “template dependent manner” refers to polynucleotide synthesis of RNA or DNA wherein the sequence of the newly synthesized strand of polynucleotide is dictated by the well-known rules of complementary base pairing (see, for example, Watson, J. D. et al., In: Molecular Biology of the Gene, 4th Ed., W. A. Benjamin, Inc., Menlo Park, Calif. (1987)). The term “complementary” refers to the broad concept of sequence complementarity between regions of two polynucleotide strands or between two nucleotides through base-pairing. It is known that an adenine nucleotide is capable of forming specific hydrogen bonds (“base pairing”) with a nucleotide which is thymine or uracil. Similarly, it is known that a cytosine nucleotide is capable of base pairing with a guanine nucleotide. As such, in the case of prime editing, it can be said that the single strand of DNA synthesized by the polymerase of the prime editor against the DNA synthesis template is said to be “complementary” to the sequence of the DNA synthesis template.

### A. Exemplary Polymerases

[0502] In various embodiments, the prime editors described herein comprise a polymerase. The disclosure contemplates any wild type polymerase obtained from any naturally-occurring organism or virus, or obtained from a commercial or non-commercial source. In addition, the polymerases usable in the prime editors of the disclosure can include any naturally-occurring mutant polymerase, engineered mutant polymerase, or other variant polymerase, including truncated variants that retain function. The polymerases usable herein may also be engineered to contain specific amino acid substitutions, such as those specifically disclosed herein. In certain preferred embodiments, the polymerases usable in the prime editors of the disclosure are template-based polymerases, i.e., they synthesize nucleotide sequences in a template-dependent manner.

[0503] A polymerase is an enzyme that synthesizes a nucleotide strand and which may be used in connection with the prime editor systems described herein. The polymerases are preferably “template-dependent” polymerases (i.e., a polymerase which synthesizes a nucleotide strand based on the order of nucleotide bases of a template strand). In certain configurations, the polymerases can also be a “template-independent” (i.e., a polymerase which synthesizes a nucleotide strand without the requirement of a template strand). A polymerase may also be further categorized as a “DNA polymerase” or an “RNA polymerase.” In various embodiments, the prime editor system comprises a DNA polymerase. In various embodiments, the DNA polymerase can be a “DNA-dependent DNA polymerase” (i.e., whereby the template molecule is a strand of DNA). In such cases, the DNA template molecule can be a pegRNA, wherein the extension arm comprises a strand of DNA. In such cases, the pegRNA may be referred to as a chimeric or hybrid pegRNA which comprises an RNA portion (i.e., the guide RNA components, including the spacer and the gRNA core) and a DNA portion (i.e., the extension arm). In various other embodiments, the DNA polymerase can be an “RNA-dependent DNA polymerase” (i.e., whereby the template molecule is a strand of RNA). In such cases, the pegRNA is RNA, i.e., including an RNA extension. The term “polymerase” may also refer to an enzyme that catalyzes the polymerization of nucleotide (i.e., the polymerase activity). Generally, the enzyme will initiate synthesis at the 3′-end of a primer annealed to a polynucleotide template sequence (e.g., such as a primer sequence annealed to the primer binding site of a pegRNA), and will proceed toward the 5′ end of the template strand. A “DNA polymerase” catalyzes the polymerization of deoxynucleotides. As used herein in reference to a DNA polymerase, the term DNA polymerase includes a “functional fragment thereof”. A “functional fragment thereof” refers to any portion of a wild-type or mutant DNA polymerase that encompasses less than the entire amino acid sequence of the polymerase and which retains the ability, under at least one set of conditions, to catalyze the polymerization of a polynucleotide. Such a functional fragment may exist as a separate entity, or it may be a constituent of a larger polypeptide, such as a fusion protein.

[0504] In some embodiments, the polymerases can be from bacteriophage. Bacteriophage DNA polymerases are generally devoid of 5′ to 3′ exonuclease activity, as this activity is encoded by a separate polypeptide. Examples of suitable DNA polymerases are T4, T7, and phi29 DNA polymerase. The enzymes available commercially are: T4 (available from many sources e.g., Epicentre) and T7 (available from many sources, e.g., Epicentre for unmodified and USB for 3′ to 5′ exo T7 “Sequenase” DNA polymerase).

[0505] The other embodiments, the polymerases are archaeal polymerases. There are 2 different classes of DNA polymerases which have been identified in archaea: 1. Family B/pol I type (homologs of Pfu from Pyrococcus furiosus) and 2. pol II type (homologs of P. furiosus DP1/DP2 2-subunit polymerase). DNA polymerases from both classes have been shown to naturally lack an associated 5′ to 3′ exonuclease activity and to possess 3′ to 5′ exonuclease (proofreading) activity. Suitable DNA polymerases (pol I or pol II) can be derived from archaea with optimal growth temperatures that are similar to the desired assay temperatures.

[0506] Thermostable archaeal DNA polymerases are isolated from Pyrococcus species (furiosus, species GB-D, woesii, abysii, horikoshii), Thermococcus species (kodakaraensis KOD1, litoralis, species 9 degrees North-7, species JDF-3, gorgonarius), Pyrodictium occultum, and Archaeoglobus fulgidus.

[0507] Polymerases may also be from eubacterial species. There are 3 classes of eubacterial DNA polymerases, pol I, II, and III. Enzymes in the Pol I DNA polymerase family possess 5′ to 3′ exonuclease activity, and certain members also exhibit 3′ to 5′ exonuclease activity. Pol II DNA polymerases naturally lack 5′ to 3′ exonuclease activity, but do exhibit 3′ to 5′ exonuclease activity. Pol III DNA polymerases represent the major replicative DNA polymerase of the cell and are composed of multiple subunits. The pol III catalytic subunit lacks 5′ to 3′ exonuclease activity, but in some cases 3′ to 5′ exonuclease activity is located in the same polypeptide.

[0508] There are a variety of commercially available Pol I DNA polymerases, some of which have been modified to reduce or abolish 5′ to 3′ exonuclease activity.

[0509] Suitable thermostable pol I DNA polymerases can be isolated from a variety of thermophilic eubacteria, including Thermus species and Thermotoga maritima such as Thermus aquaticus (Taq), Thermus thermophilus (Tth) and Thermotoga maritima (Tma UlTma).

[0510] Additional eubacteria related to those listed above are described in Thermophilic Bacteria (Kristjansson, J. K., ed.) CRC Press, Inc., Boca Raton, Fla., 1992.

[0511] The invention further provides for chimeric or non-chimeric DNA polymerases that are chemically modified according to methods disclosed in U.S. Pat. Nos. 5,677,152, 6,479,264 and 6,183,998, the contents of which are hereby incorporated by reference in their entirety.

[0512] Additional archaea DNA polymerases related to those listed above are described in the following references: Archaea: A Laboratory Manual (Robb, F. T. and Place, A. R., eds.), Cold Spring Harbor Laboratory Press, Cold Spring Harbor, N.Y., 1995 and Thermophilic Bacteria (Kristjansson, J. K., ed.) CRC Press, Inc., Boca Raton, Fla., 1992.

### B. Exemplary Reverse Transcriptases

[0513] In various embodiments, the prime editors described herein comprise a reverse transcriptase as the polymerase. The disclosure contemplates any wild type reverse transcriptase obtained from any naturally-occurring organism or virus, or obtained from a commercial or non-commercial source. In addition, the reverse transcriptases usable in the prime editors of the disclosure can include any naturally-occurring mutant RT, engineered mutant RT, or other variant RT, including truncated variants that retain function. The RTs may also be engineered to contain specific amino acid substitutions, such as those specifically disclosed herein.

[0514] Reverse transcriptases are multi-functional enzymes typically with three enzymatic activities including RNA- and DNA-dependent DNA polymerization activity, and an RNaseH activity that catalyzes the cleavage of RNA in RNA-DNA hybrids. Some mutants of reverse transcriptases have disabled the RNaseH moiety to prevent unintended damage to the mRNA. These enzymes that synthesize complementary DNA (cDNA) using mRNA as a template were first identified in RNA viruses. Subsequently, reverse transcriptases were isolated and purified directly from virus particles, cells or tissues. (e.g., see Kacian et al., 1971, Biochim. Biophys. Acta 46: 365-83; Yang et al., 1972, Biochem. Biophys. Res. Comm. 47: 505-11; Gerard et al., 1975, J. Virol. 15: 785-97; Liu et al., 1977, Arch. Virol. 55 187-200; Kato et al., 1984, J. Virol. Methods 9: 325-39; Luke et al., 1990, Biochem. 29: 1764-69 and Le Grice et al., 1991, J. Virol. 65: 7004-07, each of which are incorporated by reference). More recently, mutants and fusion proteins have been created in the quest for improved properties such as thermostability, fidelity and activity. Any of the wild type, variant, and/or mutant forms of reverse transcriptase which are known in the art or which can be made using methods known in the art are contemplated herein.

[0515] The reverse transcriptase (RT) gene (or the genetic information contained therein) can be obtained from a number of different sources. For instance, the gene may be obtained from eukaryotic cells which are infected with retrovirus, or from a number of plasmids which contain either a portion of or the entire retrovirus genome. In addition, messenger RNA-like RNA which contains the RT gene can be obtained from retroviruses. Examples of sources for RT include, but are not limited to, Moloney murine leukemia virus (M-MLV or MLVRT); human T-cell leukemia virus type 1 (HTLV-1); bovine leukemia virus (BLV); Rous Sarcoma Virus (RSV); human immunodeficiency virus (HIV); yeast, including Saccharomyces, Neurospora, Drosophila; primates; and rodents. See, for example, Weiss, et al., U.S. Pat. No. 4,663,290 (1987); Gerard, G. R., DNA:271-79 (1986); Kotewicz, M. L., et al., Gene 35:249-58 (1985); Tanese, N., et al., Proc. Natl. Acad. Sci. (USA):4944-48 (1985); Roth, M. J., at al., J. Biol. Chem. 260:9326-35 (1985); Michel, F., et al., Nature 316:641-43 (1985); Akins, R. A., et al., Cell 47:505-16 (1986), EMBO J. 4:1267-75 (1985); and Fawcett, D. F., Cell 47:1007-15 (1986) (each of which are incorporated herein by reference in their entireties).

### Wild Type RTs

[0516] Exemplary enzymes for use with the herein disclosed prime editors can include, but are not limited to, M-MLV reverse transcriptase and RSV reverse transcriptase. Enzymes having reverse transcriptase activity are commercially available. In certain embodiments, the reverse transcriptase provided in trans to the other components of the prime editor (PE) system. That is, the reverse transcriptase is expressed or otherwise provided as an individual component, i.e., not as a fusion protein with a napDNAbp.

[0517] A person of ordinary skill in the art will recognize that wild type reverse transcriptases, including but not limited to, Moloney Murine Leukemia Virus (M-MLV); Human Immunodeficiency Virus (HIV) reverse transcriptase and avian Sarcoma-Leukosis Virus (ASLV) reverse transcriptase, which includes but is not limited to Rous Sarcoma Virus (RSV) reverse transcriptase, Avian Myeloblastosis Virus (AMV) reverse transcriptase, Avian Erythroblastosis Virus (AEV) Helper Virus MCAV reverse transcriptase, Avian Myelocytomatosis Virus MC29 Helper Virus MCAV reverse transcriptase, Avian Reticuloendotheliosis Virus (REV-T) Helper Virus REV-A reverse transcriptase, Avian Sarcoma Virus UR2 Helper Virus UR2AV reverse transcriptase, Avian Sarcoma Virus Y73 Helper Virus YAV reverse transcriptase, Rous Associated Virus (RAV) reverse transcriptase, and Myeloblastosis Associated Virus (MAV) reverse transcriptase may be suitably used in the subject methods and composition described herein.

[0518] Exemplary wild type RT enzymes are as follows:

| DESCRIPTION | SEQUENCE | SEQ ID NO: |
|---|---|---|
| REVERSE | TLNIEDEYRLHETSKEPDVSLGSTWLSDFPQAWAETGG | SEQ ID NO: |
| TRANSCRIPTASE | MGLAVRQAPLIIPLKATSTPVSIKQYPMSQEARLGIKPHI | 32 |
| (M-MLV RT) | QRLLDQGILVPCQSPWNTPLLPVKKPGTNDYRPVQDLR | |
| WILD TYPE | EVNKRVEDIHPTVPNPYNLLSGLPPSHQWYTVLDLKDA | |
| MOLONEY | FFCLRLHPTSQPLFAFEWRDPEMGISGQLTWTRLPQGFK | |
| MURINE | NSPTLFDEALHRDLADFRIQHPDLILLQYVDDLLLAATSE | |
| LEUKEMIA | LDCQQGTRALLQTLGNLGYRASAKKAQICQKQVKYLG | |
| VIRUS | YLLKEGQRWLTEARKETVMGQPTPKTPRQLREFLGTAG | |
| USED IN PE1 | FCRLWIPGFAEMAAPLYPLTKTGTLFNWGPDQQKAYQEI | |
| (PRIME | KQALLTAPALGLPDLTKPFELFVDEKQGYAKGVLTQKLG | |
| EDITOR 1 | PWRRPVAYLSKKLDPVAAGWPPCLRMVAAIAVLTKDAG | |
| FUSION | KLTMGQPLVILAPHAVEALVKQPPDRWLSNARMTHYQA | |
| PROTEIN | LLLDTDRVQFGPVVALNPATLLPLPEEGLQHNCLDILAEA | |
| DISCLOSED | HGTRPDLTDQPLPDADHTWYTDGSSLLQEGQRKAGAAV | |
| HEREIN) | TTETEVIWAKALPAGTSAQRAELIALTQALKMAEGKKL | |
| | NVYTDSRYAFATAHIHGEIYRRRGLLTSEGKEIKNKDEIL | |
| | ALLKALFLPKRLSIIHCPGHQKGHSAEARGNRMADQAA | |
| | RKAAITETPDTSTLLIENSSP | |
| REVERSE | AFPLERPDWDYTTQAGRNHLVHYRQLLLAGLQNAGRS | SEQ ID NO: |
| TRANSCRIPTASE | PTNLAKVKGITQGPNESPSAFLERLKEAYRRYTPYDPED | 102 |
| MOLONEY | PGQETNVSMSFIWQSAPDIGRKLGRLEDLKSKTLGDLVR | |
| MURINE | EAEKIFNKRETPEEREERIRRETEEKEERRRTVDEQKEKE | |
| LEUKEMIA | RDRRRHREMSKLLATVVIGQEQDRQEGERKRPQLDKDQ | |
| VIRUS | CAYCKEKGHWAKDCPKKPRGPRGPRPQTSLLTLGDXGG | |
| REF SEQ. | QGQDPPPEPRITLKVGGQPVTFLVDTGAQHSVLTQNPGP | |
| AAA66622.1 | LSDKSAWVQGATGGKRYRWTTDRKVHLATGKVTHSFL | |
| | HVPDCPYPLLGRDLLTKLKAQIHFEGSGAQVVGPMGQP | |
| | LQVLTLNIEDEYRLHETSKEPDVSLGFTWLSDFPQAWAE | |
| | SGGMGLAVRQAPLIIPLKATSTPVSIKQYPMSQEARLGIK | |
| | PHIQRLLDQGILVPCQSPWNTPLLPVKKPGTNDYRPVQD | |
| | LREVNKRVEDIHPTVPNPYNLLSGLPPSHQWYTVLDLK | |
| | DAFFCLRLHPTSQPLFAFEWRDPEMGISGQLTWTRLPQG | |
| | FKNSPTLFDEALHRDLADFR | |
| REVERSE | TLQLEEEYRLFEPESTQKQEMDIWLKNFPQAWAETGGM | SEQ ID NO: |
| TRANSCRIPTASE | GTAHCQAPVLIQLKATATPISIRQYPMPHEAYQGIKPHIRR | 103 |
| FELINE | MLDQGILKPCQSPWNTPLLPVKKPGTEDYRPVQDLREV | |
| LEUKEMIA | NKRVEDIHPTVPNPYNLLSTLPPSHPWYTVLDLKDAFFC | |
| VIRUS | LRLHSESQLLFAFEWRDPEIGLSGQLTWTRLPQGFKNSPT | |
| REF SEQ. | LFDEALHSDLADFRVRYPALVLLQYVDDLLLAAATRTEC | |
| NP955579.1 | LEGTKALLETLGNKGYRASAKKAQICLQEVTYLGYSLK | |
| | DGQRWLTKARKEAILSIPVPKNSRQVREFLGTAGYCRLW | |
| | IPGFAELAAPLYPLTRPGTLFQWGTEQQLAFEDIKKALLS | |
| | SPALGLPDITKPFELFIDENSGFAKGVLVQKLGPWKRPVA | |
| | YLSKKLDTVASGWPPCLRMVAAIAILVKDAGKLTLGQPL | |
| | TILTSHPVEALVRQPPNKWLSNARMTHYQAMLLDAERV | |
| | HFGPTVSLNPATLLPLPSGGNHHDCLQILAETHGTRPDLT | |
| | DQPLPDADLTWYTDGSSFIRNGEREAGAAVTTESEVIWA | |
| | APLPPGTSAQRAELIALTQALKMAEGKKLTVYTDSRYAF | |
| | ATTHVHGEIYRRRGLLTSEGKEIKNKNEILALLEALFLPK | |
| | RLSIIHCPGHQKGDSPQAKGNRLADDTAKKAATETHSSL | |
| | TVL | |
| REVERSE | PISPIETVPVKLKPGMDGPKVKQWPLTEEKIKALVEICTE | SEQ ID NO: |
| TRANSCRIPTASE | MEKEGKISKIGPENPYNTPVFAIKKKDSTKWRKLVDFRE | 104 |
| HIV-1 RT, | LNKRTQDFWEVQLGIPHPAGLKKKKSVTVLDVGDAYFS | |
| CHAIN A | VPLDEDFRKYTAFTIPSINNETPGIRYQYNVLPQGWKGSP | |
| REF SEQ. ITL3- | AIFQSSMTKILEPFRKQNPDIVIYQYMDDLYVGSDLEIGQ | |
| A | HRTKIEELRQHLLRWGLTTPDKKHQKEPPFLWMGYELH | |
| | PDKWTVQPIVLPEKDSWTVNDIQKLVGKLNWASQIYPGI | |
| | KVRQLXKLLRGTKALTEVIPLTEEAELELAENREILKEPV | |
| | HGVYYDPSKDLIAEIQKQGQGQWTYQIYQEPFKNLKTG | |
| | KYARMRGAHTNDVKQLTEAVQKITTESIVIWGKTPKFKL | |
| | PIQKETWETWWTEYWQATWIPEWEFVNTPPLVKLWYQ | |
| | LEKEPIVGAETFYVDGAANRETKLGKAGYVTNRGRQK | |
| | VVTLTDTTNQKTELQAIYLALQDSGLEVNIVTDSQYALG | |
| | IIQAQPDQSESELVNQIIEQLIKKEKVYLAWVPAHKGIGG | |
| | NEQVDKLVSAGIRKV | |
| | SEE MARTINELLI ET AL., VIROLOGY, 1990, 174(1): 135- | |
| | 144, WHICH IS INCORPORATED BY REFERENCE | |
| REVERSE | PISPIETVPVKLKPGMDGPKVKQWPLTEEKIKALVEICTE | SEQ ID NO: |
| TRANSCRIPTASE | MEKEGKISKIGPENPYNTPVFAIKKKDSTKWRKLVDFRE | 105 |
| HIV-1 RT, | LNKRTQDFWEVQLGIPHPAGLKKKKSVTVLDVGDAYFS | |
| CHAIN B | VPLDEDFRKYTAFTIPSINNETPGIRYQYNVLPQGWKGSP | |
| REF SEQ. ITL3- | AIFQSSMTKILEPFRKQNPDIVIYQYMDDLYVGSDLEIGQ | |
| B | HRTKIEELRQHLLRWGLTTPDKKHQKEPPFLWMGYELH | |
| | PDKWTVQPIVLPEKDSWTVNDIQKLVGKLNWASQIYPGI | |
| | KVRQLCKLLRGTKALTEVIPLTEEAELELAENREILKEPV | |
| | HGVYYDPSKDLIAEIQKQGQGQWTYQIYQEPFKNLKTG | |
| | KYARMRGAHTNDVKQLTEAVQKITTESIVIWGKTPKFKL | |
| | PIQKETWETWWTEYWQATWIPEWEFVNTPPLVKLWYQ | |
| | LEKEPIVGAETF | |
| | SEE STAMMERS ET AL., J. MOL. BIOL., 1994, 242(4): 586- | |
| | 588, WHICH IS INCORPORATED BY REFERENCE | |
| REVERSE | TVALHLAIPLKWKPNHTPVWIDQWPLPEGKLVALTQLVE | SEQ ID NO: |
| TRANSCRIPTASE | KELQLGHIEPSLSCWNTPVFVIRKASGSYRLLHDLRAVN | 106 |
| ROUS | AKLVPFGAVQQGAPVLSALPRGWPLMVLDLKDCFFSIPL | |
| SARCOMA | AEQDREAFAFTLPSVNNQAPARRFQWKVLPQGMTCSPTI | |
| VIRUS RT | CQLIVGQILEPLRLKHPSLRMLHYMDDLLLAASSHDGLE | |
| REF SEQ. | AAGEEVISTLERAGFTISPDKVQKEPGVQYLGYKLGSTY | |
| ACL14945 | AAPVGLVAEPRIATLWDVQKLVGSLQWLRPALGIPPRLR | |
| | GPFYEQLRGSDPNEAREWNLDMKMAWREIVQLSTTAA | |
| | LERWDPALPLEGAVARCEQGAIGVLGQGLSTHPRPCLWL | |
| | FSTQPTKAFTAWLEVLTLLITKLRASAVRTFGKEVDILLL | |
| | PACFRDELPLPEGILLALRGFAGKIRSSDTPSIFDIARPLHV | |
| | SLKVRVTDHPVPGPTVFTDASSSTHKGVVVWREGPRWE | |
| | IKEIADLGASVQQLEARAVAMALLLWPTTPTNVVTDSAF | |
| | VAKMLLKMGQEGVPSTAAAFILEDALSQRSAMAAVLHV | |
| | RSHSEVPGFFTEGNDVADSQATFQAYPLREAKDLHTALH | |
| | IGPRALSKACNISMQQAREVVQTCPHCNSAPALEAGVNP | |
| | RGLGPLQIWQTDFTLEPRMAPRSWLAVTVDTASSAIVVT | |
| | QHGRVTSVAAQHHWATVIAVLGRPKAIKTDNGSCFTSKS | |
| | TREWLARWGIAHTTGIPGNSQGQAMVERANRLLKDKIR | |
| | VLAEGDGFMKRIPTSKQGELLAKAMYALNHFERGENTK | |
| | TPIQKHWRPTVLTEGPPVKIRIETGEWEKGWNVLVWGR | |
| | GYAAVKNRDTDKVIWVPSRKVKPDIAQKDEVTKKDEAS | |
| | PLFA | |
| | SEE YASUKAWA ET AL., J. BIOCHEM. 2009, 145(3): 315- | |
| | 324, WHICH IS INCORPORATED BY REFERENCE | |
| REVERSE | MMDHLLQKTQIQNQTEQVMNITNPNSIYIKGRLYFKGY | SEQ ID NO: |
| TRANSCRIPTASE | KKIELHCFVDTGASLCIASKFVIPEEHWINAERPIMVKIA | 107 |
| CAULIFLOWER | DGSSITINKVCRDIDLIIAGEIFHIPTVYQQESGIDFIIGNNF | |
| MOSAIC | CQLYEPFIQFTDRVIFTKDRTYPVHIAKLTRAVRVGTEGFL | |
| VIRUS RT | ESMKKRSKTQQPEPVNISTNKIAILSEGRRLSEEKLFITQQ | |
| REF SEQ. | RMQKIEELLEKVCSENPLDPNKTKQWMKASIKLSDPSK | |
| AGT42196 | AIKVKPMKYSPMDREEFDKQIKELLDLKVIKPSKSPHMA | |
| | PAFLVNNEAEKRRGKKRMVVNYKAMNKATVGDAYNLP | |
| | NKDELLTLIRGKKIFSSFDCKSGFWQVLLDQDSRPLTAFT | |
| | CPQGHYEWNVVPFGLKQAPSIFQRHMDEAFRVFRKFCC | |
| | VYVDDILVFSNNEEDHLLHVAMILQKCNQHGIILSKKKA | |
| | QLFKKKINFLGLEIDEGTHKPQGHILEHINKFPDTLEDKK | |
| | QLQRFLGILTYASDYIPKLAQIRKPLQAKLKENVPWKWT | |
| | KEDTLYMQKVKKNLQGFPPLHHPLPEEKLIIETDASDDY | |
| | WGGMLKAIKINEGTNTELICRYASGSFKAAEKNYHSND | |
| | KETLAVINTIKKFSIYLTPVHFLIRTDNTHFKSFVNLNYKG | |
| | DSKLGRNIRWQAWLSHYSFDVEHIKGTDNHFADFLSREF | |
| | NRVNS | |
| | SEE FARZADFAR ET AL., VIRUS GENES, 2013, 47(2): | |
| | 347-356, WHICH IS INCORPORATED BY REFERENCE | |
| REVERSE | MKEKISKIDKNFYTDIFIKTSFQNEFEAGGVIPPIAKNQVS | SEQ ID NO: |
| TRANSCRIPTASE | TISNKNKTFYSLAHSSPHYSIQTRIEKFLLKNIPLSASSFAF | 108 |
| KLEBSIELLA | RKERSYLHYLEPHTQNVKYCHLDIVSFFHSIDVNIVRDT | |
| PNEUMONIA | FSVYFSDEFLVKEKQSLLDAFMASVTLTAELDGVEKTFIP | |
| REF SEQ. | MGFKSSPSISNIIFRKIDILIQKFCDKNKITYTRYADDLLFS | |
| RFF81513.1 | TKKENNILSSTFFINEISSILSINKFKLNKSKYLYKEGTISL | |
| | GGYVIENILKDNSSGNIRLSSSKLNPLYKALYEIKKGSSS | |
| | KHICIKVFNLKLKRFIYKKNKEKFEAKFYSSQLKNKLLG | |
| | YRSYLLSFVIFHKKYKCINPIFLEKCVFLISEIESIMNRKF | |
| REVERSE | MKITSNNVTAVINGKGWHSINWKKCHQHVKTIQTRIAK | SEQ ID NO: |
| TRANSCRIPTASE | AACNQQWRTVGRLQRLLVRSFSARALAVKRVTENSGRK | 109 |
| ESCERICHIA | TPGVDGQIWSTPESKWEAIFKLRRKGYKPLPLKRVFIPKS | |
| COLI RT | NGKKRPLGIPVMLDRAMQALHLLGLEPVSETNADHNSY | |
| REF SEQ. | GFRPARCTADAIQQVCNMYSSRNASKWVLEGDIKGCFE | |
| TGH57013 | HISHEWLLENIPMDKQILRNWLKAGIIEKSIFSKTLSGTP | |
| | QGGIISPVLANMALDGLERLLQNRFGRNRLI | |
| REVERSE | MSKIKINYEKYHIKPFPHFDQRIKVNKKVKENLQNPFYI | SEQ ID NO: |
| TRANSCRIPTASE | AAHSFYPFIHYKKISYKFKNGTLSSPKERDIFYSGHMDG | 110 |
| BACILLUS | YIYKHYGEILNHKYNNTCIGKGIDHVSLAYRNNKMGKS | |
| SUBTILIS RT | NIHFAAEVINFISEQQQAFIFVSDFSSYFDSLDHAILKEKLI | |
| REF SEQ. | EVLEEQDKLSKDWWNVFKHITRYNWVEKEEVISDLECT | |
| QBJ66766 | KEKIARDKKSRERYYTPAEFREFRKRVNIKSNDTGVGIPQ | |
| | GTAISAVLANVYAIDLDQKLNQYALKYGGIYRRYSDDII | |
| | MVLPMTSDGQDPSNDHVSFIKSVVKRNKVTMGDSKTS | |
| | VLYYANNNIYEDYQRKRESKMDYLGFSFDGMTVKIREK | |
| | SLFKYYHRTYKKINSINWASVKKEKKVGRKKLYLLYSH | |
| | LGRNYKGHGNFISYCKKAHAVFEGNKKIESLINQQIKRH | |
| | WKKIQKRLVDV | |
| EUBACTERIUM | DTSNLMEQILSSDNLNRAYLQVVRNKGAEGVDGMKYT | SEQ ID NO: |
| RECTALE | ELKEHLAKNGETIKGQLRTRKYKPQPARRVEIPKPDGGV | 111 |
| GROUP II | RNLGVPTVTDRFIQQAIAQVLTPIYEEQFHDHSYGFRPNR | |
| INTRON RT | CAQQAILTALNIMNDGNDWIVDIDLEKFFDTVNHDKLM | |
| | TLIGRTIKDGDVISIVRKYLVSGIMIDDEYEDSIVGTPQGG | |
| | NLSPLLANIMLNELDKEMEKRGLNFVRYADDCIIMVGSE | |
| | MSANRVMRNISRFIEEKLGLKVNMTKSKVDRPSGLKYL | |
| | GFGFYFDPRAHQFKAKPHAKSVAKFKKRMKELTCRSW | |
| | GVSNSYKVEKLNQLIRGWINYFKIGSMKTLCKELDSRIR | |
| | YRLRMCIWKQWKTPQNQEKNLVKLGIDRNTARRVAYT | |
| | GKRIAYVCNKGAVNVAISNKRLASFGLISMLDYYIEKCV | |
| | TC | |
| GEOBACILLUS | ALLERILARDNLITALKRVEANQGAPGIDGVSTDQLRDYI | SEQ ID NO: |
| STEAROTHERMO- | RAHWSTIHAQLLAGTYRPAPVRRVEIPKPGGGTRQLGIP | 112 |
| PHILUS | TVVDRLIQQAILQELTPIFDPDFSSSSFGFRPGRNAHDAVR | |
| GROUP II | QAQGYIQEGYRYVVDMDLEKFFDRVNHDILMSRVARKV | |
| INTRON RT | KDKRVLKLIRAYLQAGVMIEGVKVQTEEGTPQGGPLSPL | |
| | LANILLDDLDKELEKRGLKFCRYADDCNIYVKSLRAGQ | |
| | RVKQSIQRFLEKTLKLKVNEEKSAVDRPWKRAFLGFSFT | |
| | PERKARIRLAPRSIQRLKQRIRQLTNPNWSISMPERIHRV | |
| | NQYVMGWIGYFRLVETPSVLQTIEGWIRRRLRLCQWLQ | |
| | WKRVRTRIRELRALGLKETAVMEIANTRKGAWRTTKTP | |
| | QLHQALGKTYWTAQGLKSLTQR | |

### Variant and Error-Prone RTs

[0519] Reverse transcriptases are essential for synthesizing complementary DNA (cDNA) strands from RNA templates. Reverse transcriptases are enzymes composed of distinct domains that exhibit different biochemical activities. The enzymes catalyze the synthesis of DNA from an RNA template, as follows: In the presence of an annealed primer, reverse transcriptase binds to an RNA template and initiates the polymerization reaction. RNA-dependent DNA polymerase activity synthesizes the complementary DNA (cDNA) strand, incorporating dNTPs. RNase H activity degrades the RNA template of the DNA:RNA complex. Thus, reverse transcriptases comprise (a) a binding activity that recognizes and binds to a RNA/DNA hybrid, (b) an RNA-dependent DNA polymerase activity, and (c) an RNase H activity. In addition, reverse transcriptases generally are regarded as having various attributes, including their thermostability, processivity (rate of dNTP incorporation), and fidelity (or error-rate). The reverse transcriptase variants contemplated herein may include any mutations to reverse transcriptase that impacts or changes any one or more of these enzymatic activities (e.g., RNA-dependent DNA polymerase activity, RNase H activity, or DNA/RNA hybrid-binding activity) or enzyme properties (e.g., thermostability, processivity, or fidelity). Such variants may be available in the art in the public domain, available commercially, or may be made using known methods of mutagenesis, including directed evolutionary processes (e.g., PACE or PANCE).

[0520] In various embodiments, the reverse transcriptase may be a variant reverse transcriptase. As used herein, a “variant reverse transcriptase” includes any naturally occurring or genetically engineered variant comprising one or more mutations (including singular mutations, inversions, deletions, insertions, and rearrangements) relative to a reference sequences (e.g., a reference wild type sequence). RT naturally have several activities, including an RNA-dependent DNA polymerase activity, ribonuclease H activity, and DNA-dependent DNA polymerase activity. Collectively, these activities enable the enzyme to convert single-stranded RNA into double-stranded cDNA. In retroviruses and retrotransposons, this cDNA can then integrate into the host genome, from which new RNA copies can be made via host-cell transcription. Variant RT's may comprise a mutation which impacts one or more of these activities (either which reduces or increases these activities, or which eliminates these activities all together). In addition, variant RTs may comprise one or more mutations which render the RT more or less stable, less prone to aggregation, and facilitates purification and/or detection, and/or other the modification of properties or characteristics.

[0521] A person of ordinary skill in the art will recognize that variant reverse transcriptases derived from other reverse transcriptases, including but not limited to Moloney Murine Leukemia Virus (M-MLV); Human Immunodeficiency Virus (HIV) reverse transcriptase and avian Sarcoma-Leukosis Virus (ASLV) reverse transcriptase, which includes but is not limited to Rous Sarcoma Virus (RSV) reverse transcriptase, Avian Myeloblastosis Virus (AMV) reverse transcriptase, Avian Erythroblastosis Virus (AEV) Helper Virus MCAV reverse transcriptase, Avian Myelocytomatosis Virus MC29 Helper Virus MCAV reverse transcriptase, Avian Reticuloendotheliosis Virus (REV-T) Helper Virus REV-A reverse transcriptase, Avian Sarcoma Virus UR2 Helper Virus UR2AV reverse transcriptase, Avian Sarcoma Virus Y73 Helper Virus YAV reverse transcriptase, Rous Associated Virus (RAV) reverse transcriptase, and Myeloblastosis Associated Virus (MAV) reverse transcriptase may be suitably used in the subject methods and composition described herein.

[0522] One method of preparing variant RTs is by genetic modification (e.g., by modifying the DNA sequence of a wild-type reverse transcriptase). A number of methods are known in the art that permit the random as well as targeted mutation of DNA sequences (see for example, Ausubel et. al. Short Protocols in Molecular Biology (1995) 3.sup.rd Ed. John Wiley & Sons, Inc.). In addition, there are a number of commercially available kits for site-directed mutagenesis, including both conventional and PCR-based methods. Examples include the QuikChange Site-Directed Mutagenesis Kits (AGILENT®), the Q5© Site-Directed Mutagenesis Kit (NEW ENGLAND BIOLABS®), and GeneArt™ Site-Directed Mutagenesis System (THERMOFISHER SCIENTIFIC®).

[0523] In addition, mutant reverse transcriptases may be generated by insertional mutation or truncation (N-terminal, internal, or C-terminal insertions or truncations) according to methodologies known to one skilled in the art. The term “mutation,” as used herein, refers to a substitution of a residue within a sequence, e.g., a nucleic acid or amino acid sequence, with another residue, or a deletion or insertion of one or more residues within a sequence. Mutations are typically described herein by identifying the original residue followed by the position of the residue within the sequence and by the identity of the newly substituted residue. Various methods for making the amino acid substitutions (mutations) provided herein are well known in the art, and are provided by, for example, Green and Sambrook, Molecular Cloning: A Laboratory Manual (4th ed., Cold Spring Harbor Laboratory Press, Cold Spring Harbor, N.Y. (2012)). Mutations can include a variety of categories, such as single base polymorphisms, microduplication regions, indel, and inversions, and is not meant to be limiting in any way. Mutations can include “loss-of-function” mutations which is the normal result of a mutation that reduces or abolishes a protein activity. Most loss-of-function mutations are recessive, because in a heterozygote the second chromosome copy carries an unmutated version of the gene coding for a fully functional protein whose presence compensates for the effect of the mutation. Mutations also embrace “gain-of-function” mutations, which is one which confers an abnormal activity on a protein or cell that is otherwise not present in a normal condition. Many gain-of-function mutations are in regulatory sequences rather than in coding regions, and can therefore have a number of consequences. For example, a mutation might lead to one or more genes being expressed in the wrong tissues, these tissues gaining functions that they normally lack. Because of their nature, gain-of-function mutations are usually dominant.

[0524] Older methods of site-directed mutagenesis known in the art rely on sub-cloning of the sequence to be mutated into a vector, such as an M13 bacteriophage vector, that allows the isolation of single-stranded DNA template. In these methods, one anneals a mutagenic primer (i.e., a primer capable of annealing to the site to be mutated but bearing one or more mismatched nucleotides at the site to be mutated) to the single-stranded template and then polymerizes the complement of the template starting from the 3′ end of the mutagenic primer. The resulting duplexes are then transformed into host bacteria and plaques are screened for the desired mutation.

[0525] More recently, site-directed mutagenesis has employed PCR methodologies, which have the advantage of not requiring a single-stranded template. In addition, methods have been developed that do not require sub-cloning. Several issues must be considered when PCR-based site-directed mutagenesis is performed. First, in these methods it is desirable to reduce the number of PCR cycles to prevent expansion of undesired mutations introduced by the polymerase. Second, a selection must be employed in order to reduce the number of non-mutated parental molecules persisting in the reaction. Third, an extended-length PCR method is preferred in order to allow the use of a single PCR primer set. And fourth, because of the non-template-dependent terminal extension activity of some thermostable polymerases it is often necessary to incorporate an end-polishing step into the procedure prior to blunt-end ligation of the PCR-generated mutant product.

[0526] Methods of random mutagenesis, which will result in a panel of mutants bearing one or more randomly situated mutations, exist in the art. Such a panel of mutants may then be screened for those exhibiting the desired properties, for example, increased stability, relative to a wild-type reverse transcriptase.

[0527] An example of a method for random mutagenesis is the so-called “error-prone PCR method.” As the name implies, the method amplifies a given sequence under conditions in which the DNA polymerase does not support high fidelity incorporation. Although the conditions encouraging error-prone incorporation for different DNA polymerases vary, one skilled in the art may determine such conditions for a given enzyme. A key variable for many DNA polymerases in the fidelity of amplification is, for example, the type and concentration of divalent metal ion in the buffer. The use of manganese ion and/or variation of the magnesium or manganese ion concentration may therefore be applied to influence the error rate of the polymerase.

[0528] In various aspects, the RT of the prime editors may be an “error-prone” reverse transcriptase variant. Error-prone reverse transcriptases that are known and/or available in the art may be used. It will be appreciated that reverse transcriptases naturally do not have any proofreading function; thus the error rate of reverse transcriptase is generally higher than DNA polymerases comprising a proofreading activity. The error-rate of any particular reverse transcriptase is a property of the enzyme's “fidelity,” which represents the accuracy of template-directed polymerization of DNA against its RNA template. An RT with high fidelity has a low-error rate. Conversely, an RT with low fidelity has a high-error rate. The fidelity of M-MLV-based reverse transcriptases are reported to have an error rate in the range of one error in 15,000 to 27,000 nucleotides synthesized. See Boutabout et al., “DNA synthesis fidelity by the reverse transcriptase of the yeast retrotransposon Ty1,” Nucleic Acids Res, 2001, 29: 2217-2222, which is incorporated by reference. Thus, for purposes of this application, those reverse transcriptases considered to be “error-prone” or which are considered to have an “error-prone fidelity” are those having an error rate that is less than one error in 15,000 nucleotides synthesized.

[0529] Error-prone reverse transcriptase also may be created through mutagenesis of a starting RT enzyme (e.g., a wild type M-MLV RT). The method of mutagenesis is not limited and may include directed evolution processes, such as phage-assisted continuous evolution (PACE) or phage-assisted noncontinuous evolution (PANCE). The term “phage-assisted continuous evolution (PACE),” as used herein, refers to continuous evolution that employs phage as viral vectors. The general concept of PACE technology has been described, for example, in International PCT Application, PCT/US2009/056194, filed Sep. 8, 2009, published as WO 2010/028347 on Mar. 11, 2010; International PCT Application, PCT/US2011/066747, filed Dec. 22, 2011, published as WO 2012/088381 on Jun. 28, 2012; U.S. Application, U.S. Pat. No. 9,023,594, issued May 5, 2015, International PCT Application, PCT/US2015/012022, filed Jan. 20, 2015, published as WO 2015/134121 on Sep. 11, 2015, and International PCT Application, PCT/US2016/027795, filed Apr. 15, 2016, published as WO 2016/168631 on Oct. 20, 2016, the entire contents of each of which are incorporated herein by reference.

[0530] Error-prone reverse transcriptases may also be obtain by phage-assisted non-continuous evolution (PANCE),” which as used herein, refers to non-continuous evolution that employs phage as viral vectors. PANCE is a simplified technique for rapid in vivo directed evolution using serial flask transfers of evolving ‘selection phage’ (SP), which contain a gene of interest to be evolved, across fresh E. coli host cells, thereby allowing genes inside the host E. coli to be held constant while genes contained in the SP continuously evolve. Serial flask transfers have long served as a widely-accessible approach for laboratory evolution of microbes, and, more recently, analogous approaches have been developed for bacteriophage evolution. The PANCE system features lower stringency than the PACE system.

[0531] Other error-prone reverse transcriptases have been described in the literature, each of which are contemplated for use in the herein methods and compositions. For example, error-prone reverse transcriptases have been described in Bebenek et al., “Error-prone Polymerization by HIV-1 Reverse Transcriptase,” J Biol Chem, 1993, Vol. 268: 10324-10334 and Sebastian-Martin et al., “Transcriptional inaccuracy threshold attenuates differences in RNA-dependent DNA synthesis fidelity between retroviral reverse transcriptases,” Scientific Reports, 2018, Vol. 8: 627, each of which are incorporated by reference. Still further, reverse transcriptases, including error-prone reverse transcriptases can be obtained from a commercial supplier, including ProtoScript® (II) Reverse Transcriptase, AMV Reverse Transcriptase, WarmStart® Reverse Transcriptase, and M-MuLV Reverse Transcriptase, all from NEW ENGLAND BIOLABS®, or AMV Reverse Transcriptase XL, SMARTScribe Reverse Transcriptase, GPR ultra-pure MMLV Reverse Transcriptase, all from TAKARA BIO USA, INC. (formerly CLONTECH).

[0532] The herein disclosure also contemplates reverse transcriptases having mutations in RNaseH domain. As mentioned above, one of the intrinsic properties of reverse transcriptases is the RNase H activity, which cleaves the RNA template of the RNA:cDNA hybrid concurrently with polymerization. The RNase H activity can be undesirable for synthesis of long cDNAs because the RNA template may be degraded before completion of full-length reverse transcription. The RNase H activity may also lower reverse transcription efficiency, presumably due to its competition with the polymerase activity of the enzyme. Thus, the present disclosure contemplates any reverse transcriptase variants that comprise a modified RNaseH activity.

[0533] The herein disclosure also contemplates reverse transcriptases having mutations in the RNA-dependent DNA polymerase domain. As mentioned above, one of the intrinsic properties of reverse transcriptases is the RNA-dependent DNA polymerase activity, which incorporates the nucleobases into the nascent cDNA strand as coded by the template RNA strand of the RNA:cDNA hybrid. The RNA-dependent DNA polymerase activity can be increased or decreased (i.e., in terms of its rate of incorporation) to either increase or decrease the processivity of the enzyme. Thus, the present disclosure contemplates any reverse transcriptase variants that comprise a modified RNA-dependent DNA polymerase activity such that the processivity of the enzyme of either increased or decreased relative to an unmodified version.

[0534] Also contemplated herein are reverse transcriptase variants that have altered thermostability characteristics. The ability of a reverse transcriptase to withstand high temperatures is an important aspect of cDNA synthesis. Elevated reaction temperatures help denature RNA with strong secondary structures and/or high GC content, allowing reverse transcriptases to read through the sequence. As a result, reverse transcription at higher temperatures enables full-length cDNA synthesis and higher yields, which can lead to an improved generation of the 3′ flap ssDNA as a result of the prime editing process. Wild type M-MLV reverse transcriptase typically has an optimal temperature in the range of 37-48° C.; however, mutations may be introduced that allow for the reverse transcription activity at higher temperatures of over 48° C., including 49° C., 50° C., 51° C., 52° C., 53° C., 54° C., 55° C., 56° C., 57° C., 58° C., 59° C., 60° C., 61° C., 62° C., 63° C., 64° C., 65° C., 66° C., and higher.

[0535] The variant reverse transcriptases contemplated herein, including error-prone RTs, thermostable RTs, increase-processivity RTs, can be engineered by various routine strategies, including mutagenesis or evolutionary processes. In some cases, the variants can be produced by introducing a single mutation. In other cases, the variants may require more than one mutation. For those mutants comprising more than one mutation, the effect of a given mutation may be evaluated by introduction of the identified mutation to the wild-type gene by site-directed mutagenesis in isolation from the other mutations borne by the particular mutant. Screening assays of the single mutant thus produced will then allow the determination of the effect of that mutation alone.

[0536] Variant RT enzymes used herein may also include other “RT variants” having at least about 70% identical, at least about 80% identical, at least about 90% identical, at least about 95% identical, at least about 96% identical, at least about 97% identical, at least about 98% identical, at least about 99% identical, at least about 99.5% identical, or at least about 99.9% identical to any reference RT protein, including any wild type RT, or mutant RT, or fragment RT, or other variant of RT disclosed or contemplated herein or known in the art.

[0537] In some embodiments, an RT variant may have 1, 2, 3, 4, 5, 6, 7, 8, 9, 10, 11, 12, 13, 14, 15, 16, 17, 18, 19, 20, 21, 22, 21, 24, 25, 26, 27, 28, 29, 30, 31, 32, 33, 34, 35, 36, 37, 38, 39, 40, 41, 42, 43, 44, 45, 46, 47, 48, 49, 50, or up to 100, or up to 200, or up to 300, or up to 400, or up to 500 or more amino acid changes compared to a reference RT. In some embodiments, the RT variant comprises a fragment of a reference RT, such that the fragment is at least about 70% identical, at least about 80% identical, at least about 90% identical, at least about 95% identical, at least about 96% identical, at least about 97% identical, at least about 98% identical, at least about 99% identical, at least about 99.5% identical, or at least about 99.9% identical to the corresponding fragment of the reference RT. In some embodiments, the fragment is at least 30%, at least 35%, at least 40%, at least 45%, at least 50%, at least 55%, at least 60%, at least 65%, at least 70%, at least 75%, at least 80%, at least 85%, at least 90%, at least 95% identical, at least 96%, at least 97%, at least 98%, at least 99%, or at least 99.5% of the amino acid length of a corresponding wild type RT (M-MLV reverse transcriptase) (e.g., SEQ ID NO: 32) or to any of the reverse transcriptases of SEQ ID NOs: 102-112.

[0538] In some embodiments, the disclosure also may utilize RT fragments which retain their functionality and which are fragments of any herein disclosed RT proteins. In some embodiments, the RT fragment is at least 100 amino acids in length. In some embodiments, the fragment is at least 100, 150, 200, 250, 300, 350, 400, 450, 500, 550, or up to 600 or more amino acids in length.

[0539] In still other embodiments, the disclosure also may utilize RT variants which are truncated at the N-terminus or the C-terminus, or both, by a certain number of amino acids which results in a truncated variant which still retains sufficient polymerase function. In some embodiments, the RT truncated variant has a truncation of at least 1, at least 2, at least 3, at least 4, at least 5, at least 6, at least 7, at least 8, at least 9, at least 10, at least 11, at least 12, at least 13, at least 14, at least 15, at least 16, at least 17, at least 18, at least 19, at least 20, at least 21, at least 22, at least 23, at least 24, at least 25, at least 30, 40, 50, 60, 70, 80, 90, 100, 110, 120, 130, 140, 150, 160, 170, 180, 190, 200, 210, 220, 230, 240, or 250 amino acids at the N-terminal end of the protein. In other embodiments, the RT truncated variant has a truncation of at least 1, at least 2, at least 3, at least 4, at least 5, at least 6, at least 7, at least 8, at least 9, at least 10, at least 11, at least 12, at least 13, at least 14, at least 15, at least 16, at least 17, at least 18, at least 19, at least 20, at least 21, at least 22, at least 23, at least 24, at least 25, at least 30, 40, 50, 60, 70, 80, 90, 100, 110, 120, 130, 140, 150, 160, 170, 180, 190, 200, 210, 220, 230, 240, or 250 amino acids at the C-terminal end of the protein. In still other embodiments, the RT truncated variant has a truncation at the N-terminal and the C-terminal end which are the same or different lengths.

[0540] For example, the prime editors disclosed herein may include a truncated version of M-MLV reverse transcriptase. In this embodiment, the reverse transcriptase contains 4 mutations (D200N, T306K, W313F, T330P; noting that the L603W mutation present in PE2 is no longer present due to the truncation). The DNA sequence encoding this truncated editor is 522 bp smaller than PE2, and therefore makes its potentially useful for applications where delivery of the DNA sequence is challenging due to its size (i.e., adeno-associated virus and lentivirus delivery). This embodiment is referred to as MMLV-RT(trunc) and has the following amino acid sequence:

| | |
|---|---|
| MMLV- | TLNIEDEYRLHETSKEPDVSLGSTWLSDFPQAWAETGGMGLA |
| RT | VRQAPLIIPLKATSTPVSIKQYPMSQEARLGIKPHIQRLLDQ |
| (TRUNC) | GILVPCQSPWNTPLLPVKKPGTNDYRPVQDLREVNKRVEDIH |
| | PTVPNPYNLLSGLPPSHQWYTVLDLKDAFFCLRLHPTSQPLF |
| | AFEWRDPEMGISGQLTWTRLPQGFKNSPTLFNEALHRDLADF |
| | RIQHPDLILLQYVDDLLLAATSELDCQQGTRALLQTLGNLGY |
| | RASAKKAQICQKQVKYLGYLLKEGQRWLTEARKETVMGQPTP |
| | KTPRQLREFLGKAGFCRLFIPGFAEMAAPLYPLTKPGTLFNW |
| | GPDQQKAYQEIKQALLTAPALGLPDLTKPFELFVDEKQGYAK |
| | GVLTQKLGPWRRPVAYLSKKLDPVAAGWPPCLRMVAAIAVLT |
| | KDAGKLTMGQPLVILAPHAVEALVKQPPDRWLSNARMTHYQA |
| | LLLDTDRVQFGPVVALNPATLLPLPEEGLQHNCLDNSRLIN |
| | (SEQ ID NO: 36) |

[0541] In various embodiments, the prime editors disclosed herein may comprise one of the RT variants described herein, or a RT variant thereof having at least about 70% identical, at least about 80% identical, at least about 90% identical, at least about 95% identical, at least about 96% identical, at least about 97% identical, at least about 98% identical, at least about 99% identical, at least about 99.5% identical, or at least about 99.9% identical to any reference Cas9 variants.

[0542] In still other embodiments, the present methods and compositions may utilize a DNA polymerase that has been evolved into a reverse transcriptase, as described in Effefson et al., “Synthetic evolutionary origin of a proofreading reverse transcriptase,” Science, Jun. 24, 2016, Vol. 352: 1590-1593, the contents of which are incorporated herein by reference.

[0543] In certain other embodiments, the reverse transcriptase is provided as a component of a fusion protein also comprising a napDNAbp. In other words, in some embodiments, the reverse transcriptase is fused to a napDNAbp as a fusion protein.

[0544] In various embodiments, variant reverse transcriptases can be engineered from wild type M-MLV reverse transcriptase as represented by SEQ ID NO: 32.

[0545] In various embodiments, the prime editors described herein (with RT provided as either a fusion partner or in trans) can include a variant RT comprising one or more of the following mutations: P51L, S67K, E69K, L139P, T197A, D200N, H204R, F209N, E302K, E302R, T306K, F309N, W313F, T330P, L345G, L435G, N454K, D524G, E562Q, D583N, H594Q, L603W, E607K, or D653N in the wild type M-MLV RT of SEQ ID NO: 32 or at a corresponding amino acid position in another wild type RT polypeptide sequence.

[0546] Some exemplary reverse transcriptases that can be fused to napDNAbp proteins or provided as individual proteins according to various embodiments of this disclosure are provided below. Exemplary reverse transcriptases include variants with at least 80%, at least 85%, at least 90%, at least 95%, or at least 99% sequence identity to the following wild-type enzymes or partial enzymes:

| Description | Sequence (variant substitutions relative to wild type) | SEQ ID NO: |
|---|---|---|
| Reverse | TLNIEDEYRLHETSKEPDVSLGSTWLSDFPQAWAETGG | SEQ ID NO: |
| transcriptase | MGLAVRQAPLIIPLKATSTPVSIKQYPMSQEARLGIKPHI | 32 |
| (M-MLV | QRLLDQGILVPCQSPWNTPLLPVKKPGTNDYRPVQDLR | |
| RT) wild | EVNKRVEDIHPTVPNPYNLLSGLPPSHQWYTVLDLKDA | |
| type | FFCLRLHPTSQPLFAFEWRDPEMGISGQLTWTRLPQGFK | |
| moloney | NSPTLFDEALHRDLADFRIQHPDLILLQYVDDLLLAATS | |
| murine | ELDCQQGTRALLQTLGNLGYRASAKKAQICQKQVKYL | |
| leukemia | GYLLKEGQRWLTEARKETVMGQPTPKTPRQLREFLGT | |
| virus | AGFCRLWIPGFAEMAAPLYPLTKTGTLFNWGPDQQKA | |
| Used in | YQEIKQALLTAPALGLPDLTKPFELFVDEKQGYAKGVL | |
| PE1 (prime | TQKLGPWRRPVAYLSKKLDPVAAGWPPCLRMVAAIAV | |
| editor 1 | LTKDAGKLTMGQPLVILAPHAVEALVKQPPDRWLSNA | |
| fusion | RMTHYQALLLDTDRVQFGPVVALNPATLLPLPEEGLQH | |
| protein | NCLDILAEAHGTRPDLTDQPLPDADHTWYTDGSSLLQE | |
| disclosed | GQRKAGAAVTTETEVIWAKALPAGTSAQRAELIALTQA | |
| herein) | LKMAEGKKLNVYTDSRYAFATAHIHGEIYRRRGLLTSE | |
| | GKEIKNKDEILALLKALFLPKRLSIIHCPGHQKGHSAEA | |
| | RGNRMADQAARKAAITETPDTSTLLIENSSP (SEQ ID | |
| | NO: 32) | |
| M-MLV RT | TLNIEDEYRLHETSKEPDVSLGSTWLSDFPQAWAETGG | SEQ ID NO: |
| D200N | MGLAVRQAPLIIPLKATSTPVSIKQYPMSQEARLGIKPHI | 113 |
| | QRLLDQGILVPCQSPWNTPLLPVKKPGTNDYRPVQDLR | |
| | EVNKRVEDIHPTVPNPYNLLSGLPPSHQWYTVLDLKDA | |
| | FFCLRLHPTSQPLFAFEWRDPEMGISGQLTWTRLPQGFK | |
| | NSPTLFNEALHRDLADFRIQHPDLILLQYVDDLLLAATS | |
| | ELDCQQGTRALLQTLGNLGYRASAKKAQICQKQVKYL | |
| | GYLLKEGQRWLTEARKETVMGQPTPKTPRQLREFLGT | |
| | AGFCRLWIPGFAEMAAPLYPLTKTGTLFNWGPDQQKA | |
| | YQEIKQALLTAPALGLPDLTKPFELFVDEKQGYAKGVL | |
| | TQKLGPWRRPVAYLSKKLDPVAAGWPPCLRMVAAIAV | |
| | LTKDAGKLTMGQPLVILAPHAVEALVKQPPDRWLSNA | |
| | RMTHYQALLLDTDRVQFGPVVALNPATLLPLPEEGLQH | |
| | NCLDILAEAHGTRPDLTDQPLPDADHTWYTDGSSLLQE | |
| | GQRKAGAAVTTETEVIWAKALPAGTSAQRAELIALTQA | |
| | LKMAEGKKLNVYTDSRYAFATAHIHGEIYRRRGLLTSE | |
| | GKEIKNKDEILALLKALFLPKRLSIIHCPGHQKGHSAEA | |
| | RGNRMADQAARKAAITETPDTSTLLIENSSP (SEQ ID | |
| | NO: 701) | |
| M-MLV RT | TLNIEDEYRLHETSKEPDVSLGSTWLSDFPQAWAETGG | SEQ ID NO: |
| D200N | MGLAVRQAPLIIPLKATSTPVSIKQYPMSQEARLGIKPHI | 114 |
| T330P | QRLLDQGILVPCQSPWNTPLLPVKKPGTNDYRPVQDLR | |
| | EVNKRVEDIHPTVPNPYNLLSGLPPSHQWYTVLDLKDA | |
| | FFCLRLHPTSQPLFAFEWRDPEMGISGQLTWTRLPQGFK | |
| | NSPTLFNEALHRDLADFRIQHPDLILLQYVDDLLLAATS | |
| | ELDCQQGTRALLQTLGNLGYRASAKKAQICQKQVKYL | |
| | GYLLKEGQRWLTEARKETVMGQPTPKTPRQLREFLGT | |
| | AGFCRLWIPGFAEMAAPLYPLTKPGTLFNWGPDQQKA | |
| | YQEIKQALLTAPALGLPDLTKPFELFVDEKQGYAKGVL | |
| | TQKLGPWRRPVAYLSKKLDPVAAGWPPCLRMVAAIAV | |
| | LTKDAGKLTMGQPLVILAPHAVEALVKQPPDRWLSNA | |
| | RMTHYQALLLDTDRVQFGPVVALNPATLLPLPEEGLQH | |
| | NCLDILAEAHGTRPDLTDQPLPDADHTWYTDGSSLLQE | |
| | GQRKAGAAVTTETEVIWAKALPAGTSAQRAELIALTQA | |
| | LKMAEGKKLNVYTDSRYAFATAHIHGEIYRRRGLLTSE | |
| | GKEIKNKDEILALLKALFLPKRLSIIHCPGHQKGHSAEA | |
| | RGNRMADQAARKAAITETPDTSTLLIENSSP | |
| M-MLV RT | TLNIEDEYRLHETSKEPDVSLGSTWLSDFPQAWAETGG | SEQ ID NO: |
| D200N | MGLAVRQAPLIIPLKATSTPVSIKQYPMSQEARLGIKPHI | 115 |
| T330P | QRLLDQGILVPCQSPWNTPLLPVKKPGTNDYRPVQDLR | |
| L603W | EVNKRVEDIHPTVPNPYNLLSGLPPSHQWYTVLDLKDA | |
| | FFCLRLHPTSQPLFAFEWRDPEMGISGQLTWTRLPQGFK | |
| | NSPTLFNEALHRDLADFRIQHPDLILLQYVDDLLLAATS | |
| | ELDCQQGTRALLQTLGNLGYRASAKKAQICQKQVKYL | |
| | GYLLKEGQRWLTEARKETVMGQPTPKTPRQLREFLGT | |
| | AGFCRLWIPGFAEMAAPLYPLTKPGTLFNWGPDQQKA | |
| | YQEIKQALLTAPALGLPDLTKPFELFVDEKQGYAKGVL | |
| | TQKLGPWRRPVAYLSKKLDPVAAGWPPCLRMVAAIAV | |
| | LTKDAGKLTMGQPLVILAPHAVEALVKQPPDRWLSNA | |
| | RMTHYQALLLDTDRVQFGPVVALNPATLLPLPEEGLQH | |
| | NCLDILAEAHGTRPDLTDQPLPDADHTWYTDGSSLLQE | |
| | GQRKAGAAVTTETEVIWAKALPAGTSAQRAELIALTQA | |
| | LKMAEGKKLNVYTDSRYAFATAHIHGEIYRRRGWLTS | |
| | EGKEIKNKDEILALLKALFLPKRLSIIHCPGHQKGHSAE | |
| | ARGNRMADQAARKAAITETPDTSTLLIENSSP | |
| M-MLV RT | TLNIEDEYRLHETSKEPDVSLGSTWLSDFPQAWAETGG | SEQ ID NO: |
| D200N | MGLAVRQAPLIIPLKATSTPVSIKQYPMSQKARLGIKPHI | 116 |
| T330P | QRLLDQGILVPCQSPWNTPLLPVKKPGTNDYRPVQDLR | |
| L603W | EVNKRVEDIHPTVPNPYNLLSGLPPSHQWYTVLDLKDA | |
| E69K | FFCLRLHPTSQPLFAFEWRDPEMGISGQLTWTRLPQGFK | |
| | NSPTLFNEALHRDLADFRIQHPDLILLQYVDDLLLAATS | |
| | ELDCQQGTRALLQTLGNLGYRASAKKAQICQKQVKYL | |
| | GYLLKEGQRWLTEARKETVMGQPTPKTPRQLREFLGT | |
| | AGFCRLWIPGFAEMAAPLYPLTKPGTLFNWGPDQQKA | |
| | YQEIKQALLTAPALGLPDLTKPFELFVDEKQGYAKGVL | |
| | TQKLGPWRRPVAYLSKKLDPVAAGWPPCLRMVAAIAV | |
| | LTKDAGKLTMGQPLVILAPHAVEALVKQPPDRWLSNA | |
| | RMTHYQALLLDTDRVQFGPVVALNPATLLPLPEEGLQH | |
| | NCLDILAEAHGTRPDLTDQPLPDADHTWYTDGSSLLQE | |
| | GQRKAGAAVTTETEVIWAKALPAGTSAQRAELIALTQA | |
| | LKMAEGKKLNVYTDSRYAFATAHIHGEIYRRRGWLTS | |
| | EGKEIKNKDEILALLKALFLPKRLSIIHCPGHQKGHSAE | |
| | ARGNRMADQAARKAAITETPDTSTLLIENSSP | |
| M-MLV RT | TLNIEDEYRLHETSKEPDVSLGSTWLSDFPQAWAETGG | SEQ ID NO: |
| D200N | MGLAVRQAPLIIPLKATSTPVSIKQYPMSQEARLGIKPHI | 117 |
| T330P | QRLLDQGILVPCQSPWNTPLLPVKKPGTNDYRPVQDLR | |
| L603W | EVNKRVEDIHPTVPNPYNLLSGLPPSHQWYTVLDLKDA | |
| E302R | FFCLRLHPTSQPLFAFEWRDPEMGISGQLTWTRLPQGFK | |
| | NSPTLFNEALHRDLADFRIQHPDLILLQYVDDLLLAATS | |
| | ELDCQQGTRALLQTLGNLGYRASAKKAQICQKQVKYL | |
| | GYLLKEGQRWLTEARKETVMGQPTPKTPRQLRRFLGT | |
| | AGFCRLWIPGFAEMAAPLYPLTKPGTLFNWGPDQQKA | |
| | YQEIKQALLTAPALGLPDLTKPFELFVDEKQGYAKGVL | |
| | TQKLGPWRRPVAYLSKKLDPVAAGWPPCLRMVAAIAV | |
| | LTKDAGKLTMGQPLVILAPHAVEALVKQPPDRWLSNA | |
| | RMTHYQALLLDTDRVQFGPVVALNPATLLPLPEEGLQH | |
| | NCLDILAEAHGTRPDLTDQPLPDADHTWYTDGSSLLQE | |
| | GQRKAGAAVTTETEVIWAKALPAGTSAQRAELIALTQA | |
| | LKMAEGKKLNVYTDSRYAFATAHIHGEIYRRRGWLTS | |
| | EGKEIKNKDEILALLKALFLPKRLSIIHCPGHQKGHSAE | |
| | ARGNRMADQAARKAAITETPDTSTLLIENSSP | |
| M-MLV RT | TLNIEDEYRLHETSKEPDVSLGSTWLSDFPQAWAETGG | SEQ ID NO: |
| D200N | MGLAVRQAPLIIPLKATSTPVSIKQYPMSQEARLGIKPHI | 118 |
| T330P | QRLLDQGILVPCQSPWNTPLLPVKKPGTNDYRPVQDLR | |
| L603W | EVNKRVEDIHPTVPNPYNLLSGLPPSHQWYTVLDLKDA | |
| E607K | FFCLRLHPTSQPLFAFEWRDPEMGISGQLTWTRLPQGFK | |
| | NSPTLFNEALHRDLADFRIQHPDLILLQYVDDLLLAATS | |
| | ELDCQQGTRALLQTLGNLGYRASAKKAQICQKQVKYL | |
| | GYLLKEGQRWLTEARKETVMGQPTPKTPRQLREFLGT | |
| | AGFCRLWIPGFAEMAAPLYPLTKPGTLFNWGPDQQKA | |
| | YQEIKQALLTAPALGLPDLTKPFELFVDEKQGYAKGVL | |
| | TQKLGPWRRPVAYLSKKLDPVAAGWPPCLRMVAAIAV | |
| | LTKDAGKLTMGQPLVILAPHAVEALVKQPPDRWLSNA | |
| | RMTHYQALLLDTDRVQFGPVVALNPATLLPLPEEGLQH | |
| | NCLDILAEAHGTRPDLTDQPLPDADHTWYTDGSSLLQE | |
| | GQRKAGAAVTTETEVIWAKALPAGTSAQRAELIALTQA | |
| | LKMAEGKKLNVYTDSRYAFATAHIHGEIYRRRGWLTS | |
| | KGKEIKNKDEILALLKALFLPKRLSIIHCPGHQKGHSAE | |
| | ARGNRMADQAARKAAITETPDTSTLLIENSSP | |
| M-MLV RT | TLNIEDEYRLHETSKEPDVSLGSTWLSDFPQAWAETGG | SEQ ID NO: |
| D200N | MGLAVRQAPLIIPLKATSTPVSIKQYPMSQEARLGIKPHI | 119 |
| T330P | QRLLDQGILVPCQSPWNTPLLPVKKPGTNDYRPVQDLR | |
| L603W | EVNKRVEDIHPTVPNPYNLLSGPPPSHQWYTVLDLKDA | |
| L139P | FFCLRLHPTSQPLFAFEWRDPEMGISGQLTWTRLPQGFK | |
| | NSPTLFNEALHRDLADFRIQHPDLILLQYVDDLLLAATS | |
| | ELDCQQGTRALLQTLGNLGYRASAKKAQICQKQVKYL | |
| | GYLLKEGQRWLTEARKETVMGQPTPKTPRQLREFLGT | |
| | AGFCRLWIPGFAEMAAPLYPLTKPGTLFNWGPDQQKA | |
| | YQEIKQALLTAPALGLPDLTKPFELFVDEKQGYAKGVL | |
| | TQKLGPWRRPVAYLSKKLDPVAAGWPPCLRMVAAIAV | |
| | LTKDAGKLTMGQPLVILAPHAVEALVKQPPDRWLSNA | |
| | RMTHYQALLLDTDRVQFGPVVALNPATLLPLPEEGLQH | |
| | NCLDILAEAHGTRPDLTDQPLPDADHTWYTDGSSLLQE | |
| | GQRKAGAAVTTETEVIWAKALPAGTSAQRAELIALTQA | |
| | LKMAEGKKLNVYTDSRYAFATAHIHGEIYRRRGWLTS | |
| | EGKEIKNKDEILALLKALFLPKRLSIIHCPGHQKGHSAE | |
| | ARGNRMADQAARKAAITETPDTSTLLIENSSP | |
| M-MLV RT | TLNIEDEYRLHETSKEPDVSLGSTWLSDFPQAWAETGG | SEQ ID NO: |
| D200N | MGLAVRQAPLIIPLKATSTPVSIKQYPMSQEARLGIKPHI | 120 |
| T330P | QRLLDQGILVPCQSPWNTPLLPVKKPGTNDYRPVQDLR | |
| L603W | EVNKRVEDIHPTVPNPYNLLSGLPPSHQWYTVLDLKDA | |
| L435G | FFCLRLHPTSQPLFAFEWRDPEMGISGQLTWTRLPQGFK | |
| | NSPTLFNEALHRDLADFRIQHPDLILLQYVDDLLLAATS | |
| | ELDCQQGTRALLQTLGNLGYRASAKKAQICQKQVKYL | |
| | GYLLKEGQRWLTEARKETVMGQPTPKTPRQLREFLGT | |
| | AGFCRLWIPGFAEMAAPLYPLTKPGTLFNWGPDQQKA | |
| | YQEIKQALLTAPALGLPDLTKPFELFVDEKQGYAKGVL | |
| | TQKLGPWRRPVAYLSKKLDPVAAGWPPCLRMVAAIAV | |
| | LTKDAGKLTMGQPLVIGAPHAVEALVKQPPDRWLSNA | |
| | RMTHYQALLLDTDRVQFGPVVALNPATLLPLPEEGLQH | |
| | NCLDILAEAHGTRPDLTDQPLPDADHTWYTDGSSLLQE | |
| | GQRKAGAAVTTETEVIWAKALPAGTSAQRAELIALTQA | |
| | LKMAEGKKLNVYTDSRYAFATAHIHGEIYRRRGWLTS | |
| | EGKEIKNKDEILALLKALFLPKRLSIIHCPGHQKGHSAE | |
| | ARGNRMADQAARKAAITETPDTSTLLIENSSP | |
| M-MLV RT | TLNIEDEYRLHETSKEPDVSLGSTWLSDFPQAWAETGG | SEQ ID NO: |
| D200N | MGLAVRQAPLIIPLKATSTPVSIKQYPMSQEARLGIKPHI | 121 |
| T330P | QRLLDQGILVPCQSPWNTPLLPVKKPGTNDYRPVQDLR | |
| L603W | EVNKRVEDIHPTVPNPYNLLSGLPPSHQWYTVLDLKDA | |
| N454K | FFCLRLHPTSQPLFAFEWRDPEMGISGQLTWTRLPQGFK | |
| | NSPTLFNEALHRDLADFRIQHPDLILLQYVDDLLLAATS | |
| | ELDCQQGTRALLQTLGNLGYRASAKKAQICQKQVKYL | |
| | GYLLKEGQRWLTEARKETVMGQPTPKTPRQLREFLGT | |
| | AGFCRLWIPGFAEMAAPLYPLTKPGTLFNWGPDQQKA | |
| | YQEIKQALLTAPALGLPDLTKPFELFVDEKQGYAKGVL | |
| | TQKLGPWRRPVAYLSKKLDPVAAGWPPCLRMVAAIAV | |
| | LTKDAGKLTMGQPLVILAPHAVEALVKQPPDRWLSKA | |
| | RMTHYQALLLDTDRVQFGPVVALNPATLLPLPEEGLQH | |
| | NCLDILAEAHGTRPDLTDQPLPDADHTWYTDGSSLLQE | |
| | GQRKAGAAVTTETEVIWAKALPAGTSAQRAELIALTQA | |
| | LKMAEGKKLNVYTDSRYAFATAHIHGEIYRRRGWLTS | |
| | EGKEIKNKDEILALLKALFLPKRLSIIHCPGHQKGHSAE | |
| | ARGNRMADQAARKAAITETPDTSTLLIENSSP | |
| M-MLV RT | TLNIEDEYRLHETSKEPDVSLGSTWLSDFPQAWAETGG | SEQ ID NO: |
| D200N | MGLAVRQAPLIIPLKATSTPVSIKQYPMSQEARLGIKPHI | 122 |
| T330P | QRLLDQGILVPCQSPWNTPLLPVKKPGTNDYRPVQDLR | |
| L603W | EVNKRVEDIHPTVPNPYNLLSGLPPSHQWYTVLDLKDA | |
| T306K | FFCLRLHPTSQPLFAFEWRDPEMGISGQLTWTRLPQGFK | |
| | NSPTLFNEALHRDLADFRIQHPDLILLQYVDDLLLAATS | |
| | ELDCQQGTRALLQTLGNLGYRASAKKAQICQKQVKYL | |
| | GYLLKEGQRWLTEARKETVMGQPTPKTPRQLREFLGK | |
| | AGFCRLWIPGFAEMAAPLYPLTKPGTLFNWGPDQQKA | |
| | YQEIKQALLTAPALGLPDLTKPFELFVDEKQGYAKGVL | |
| | TQKLGPWRRPVAYLSKKLDPVAAGWPPCLRMVAAIAV | |
| | LTKDAGKLTMGQPLVILAPHAVEALVKQPPDRWLSNA | |
| | RMTHYQALLLDTDRVQFGPVVALNPATLLPLPEEGLQH | |
| | NCLDILAEAHGTRPDLTDQPLPDADHTWYTDGSSLLQE | |
| | GQRKAGAAVTTETEVIWAKALPAGTSAQRAELIALTQA | |
| | LKMAEGKKLNVYTDSRYAFATAHIHGEIYRRRGWLTS | |
| | EGKEIKNKDEILALLKALFLPKRLSIIHCPGHQKGHSAE | |
| | ARGNRMADQAARKAAITETPDTSTLLIENSSP | |
| M-MLV RT | TLNIEDEYRLHETSKEPDVSLGSTWLSDFPQAWAETGG | SEQ ID NO: |
| D200N | MGLAVRQAPLIIPLKATSTPVSIKQYPMSQEARLGIKPHI | 123 |
| T330P | QRLLDQGILVPCQSPWNTPLLPVKKPGTNDYRPVQDLR | |
| L603W | EVNKRVEDIHPTVPNPYNLLSGLPPSHQWYTVLDLKDA | |
| W313F | FFCLRLHPTSQPLFAFEWRDPEMGISGQLTWTRLPQGFK | |
| | NSPTLFNEALHRDLADFRIQHPDLILLQYVDDLLLAATS | |
| | ELDCQQGTRALLQTLGNLGYRASAKKAQICQKQVKYL | |
| | GYLLKEGQRWLTEARKETVMGQPTPKTPRQLREFLGT | |
| | AGFCRLFIPGFAEMAAPLYPLTKPGTLFNWGPDQQKAY | |
| | QEIKQALLTAPALGLPDLTKPFELFVDEKQGYAKGVLT | |
| | QKLGPWRRPVAYLSKKLDPVAAGWPPCLRMVAAIAVL | |
| | TKDAGKLTMGQPLVILAPHAVEALVKQPPDRWLSNAR | |
| | MTHYQALLLDTDRVQFGPVVALNPATLLPLPEEGLQH | |
| | NCLDILAEAHGTRPDLTDQPLPDADHTWYTDGSSLLQE | |
| | GQRKAGAAVTTETEVIWAKALPAGTSAQRAELIALTQA | |
| | LKMAEGKKLNVYTDSRYAFATAHIHGEIYRRRGWLTS | |
| | EGKEIKNKDEILALLKALFLPKRLSIIHCPGHQKGHSAE | |
| | ARGNRMADQAARKAAITETPDTSTLLIENSSP | |
| M-MLV RT | TLNIEDEYRLHETSKEPDVSLGSTWLSDFPQAWAETGG | SEQ ID NO: |
| D200N | MGLAVRQAPLIIPLKATSTPVSIKQYPMSQEARLGIKPHI | 124 |
| T330P | QRLLDQGILVPCQSPWNTPLLPVKKPGTNDYRPVQDLR | |
| L603W | EVNKRVEDIHPTVPNPYNLLSGLPPSHQWYTVLDLKDA | |
| D524G | FFCLRLHPTSQPLFAFEWRDPEMGISGQLTWTRLPQGFK | |
| E562Q | NSPTLFNEALHRDLADFRIQHPDLILLQYVDDLLLAATS | |
| D583N | ELDCQQGTRALLQTLGNLGYRASAKKAQICQKQVKYL | |
| | GYLLKEGQRWLTEARKETVMGQPTPKTPRQLREFLGT | |
| | AGFCRLWIPGFAEMAAPLYPLTKPGTLFNWGPDQQKA | |
| | YQEIKQALLTAPALGLPDLTKPFELFVDEKQGYAKGVL | |
| | TQKLGPWRRPVAYLSKKLDPVAAGWPPCLRMVAAIAV | |
| | LTKDAGKLTMGQPLVILAPHAVEALVKQPPDRWLSNA | |
| | RMTHYQALLLDTDRVQFGPVVALNPATLLPLPEEGLQH | |
| | NCLDILAEAHGTRPDLTDQPLPDADHTWYTGGSSLLQE | |
| | GQRKAGAAVTTETEVIWAKALPAGTSAQRAQLIALTQ | |
| | ALKMAEGKKLNVYTNSRYAFATAHIHGEIYRRRGWLT | |
| | SEGKEIKNKDEILALLKALFLPKRLSIIHCPGHQKGHSAE | |
| | ARGNRMADQAARKAAITETPDTSTLLIENSSP | |
| M-MLV RT | TLNIEDEYRLHETSKEPDVSLGSTWLSDFPQAWAETGG | SEQ ID NO: |
| D200N | MGLAVRQAPLIIPLKATSTPVSIKQYPMSQEARLGIKPHI | 125 |
| T330P | QRLLDQGILVPCQSPWNTPLLPVKKPGTNDYRPVQDLR | |
| L603W | EVNKRVEDIHPTVPNPYNLLSGLPPSHQWYTVLDLKDA | |
| E302R | FFCLRLHPTSQPLFAFEWRDPEMGISGQLTWTRLPQGFK | |
| W313F | NSPTLFNEALHRDLADFRIQHPDLILLQYVDDLLLAATS | |
| | ELDCQQGTRALLQTLGNLGYRASAKKAQICQKQVKYL | |
| | GYLLKEGQRWLTEARKETVMGQPTPKTPRQLRRFLGT | |
| | AGFCRLFIPGFAEMAAPLYPLTKPGTLFNWGPDQQKAY | |
| | QEIKQALLTAPALGLPDLTKPFELFVDEKQGYAKGVLT | |
| | QKLGPWRRPVAYLSKKLDPVAAGWPPCLRMVAAIAVL | |
| | TKDAGKLTMGQPLVILAPHAVEALVKQPPDRWLSNAR | |
| | MTHYQALLLDTDRVQFGPVVALNPATLLPLPEEGLQH | |
| | NCLDILAEAHGTRPDLTDQPLPDADHTWYTDGSSLLQE | |
| | GQRKAGAAVTTETEVIWAKALPAGTSAQRAELIALTQA | |
| | LKMAEGKKLNVYTDSRYAFATAHIHGEIYRRRGWLTS | |
| | EGKEIKNKDEILALLKALFLPKRLSIIHCPGHQKGHSAE | |
| | ARGNRMADQAARKAAITETPDTSTLLIENSSP | |
| M-MLV RT | TLNIEDEYRLHETSKEPDVSLGSTWLSDFPQAWAETGG | SEQ ID NO: |
| D200N | MGLAVRQAPLIIPLKATSTPVSIKQYPMSQEARLGIKPHI | 126 |
| T330P | QRLLDQGILVPCQSPWNTPLLPVKKPGTNDYRPVQDLR | |
| L603W | EVNKRVEDIHPTVPNPYNLLSGPPPSHQWYTVLDLKDA | |
| E607K | FFCLRLHPTSQPLFAFEWRDPEMGISGQLTWTRLPQGFK | |
| L139P | NSPTLFNEALHRDLADFRIQHPDLILLQYVDDLLLAATS | |
| | ELDCQQGTRALLQTLGNLGYRASAKKAQICQKQVKYL | |
| | GYLLKEGQRWLTEARKETVMGQPTPKTPRQLREFLGT | |
| | AGFCRLWIPGFAEMAAPLYPLTKPGTLFNWGPDQQKA | |
| | YQEIKQALLTAPALGLPDLTKPFELFVDEKQGYAKGVL | |
| | TQKLGPWRRPVAYLSKKLDPVAAGWPPCLRMVAAIAV | |
| | LTKDAGKLTMGQPLVILAPHAVEALVKQPPDRWLSNA | |
| | RMTHYQALLLDTDRVQFGPVVALNPATLLPLPEEGLQH | |
| | NCLDILAEAHGTRPDLTDQPLPDADHTWYTDGSSLLQE | |
| | GQRKAGAAVTTETEVIWAKALPAGTSAQRAELIALTQA | |
| | LKMAEGKKLNVYTDSRYAFATAHIHGEIYRRRGWLTS | |
| | KGKEIKNKDEILALLKALFLPKRLSIIHCPGHQKGHSAE | |
| | ARGNRMADQAARKAAITETPDTSTLLIENSSP | |
| M-MLV RT | TLNIEDEYRLHETSKEPDVSLGSTWLSDFPQAWAETGG | SEQ ID NO: |
| P51L S67K | MGLAVRQAPLIILLKATSTPVSIKQYPMKQEARLGIKPH | 127 |
| T197A | IQRLLDQGILVPCQSPWNTPLLPVKKPGTNDYRPVQDL | |
| H204R | REVNKRVEDIHPTVPNPYNLLSGLPPSHQWYTVLDLKD | |
| E302K | AFFCLRLHPTSQPLFAFEWRDPEMGISGQLTWTRLPQGF | |
| F309N | KNSPALFDEALRRDLADFRIQHPDLILLQYVDDLLLAAT | |
| W313F | SELDCQQGTRALLQTLGNLGYRASAKKAQICQKQVKY | |
| T330P | LGYLLKEGQRWLTEARKETVMGQPTPKTPRQLRKFLG | |
| L435G | TAGNCRLFIPGFAEMAAPLYPLTKPGTLFNWGPDQQKA | |
| N454K | YQEIKQALLTAPALGLPDLTKPFELFVDEKQGYAKGVL | |
| D524G | TQKLGPWRRPVAYLSKKLDPVAAGWPPCLRMVAAIAV | |
| D583N | LTKDAGKLTMGQPLVIGAPHAVEALVKQPPDRWLSKA | |
| H594Q | RMTHYQALLLDTDRVQFGPVVALNPATLLPLPEEGLQH | |
| D653N | NCLDILAEAHGTRPDLTDQPLPDADHTWYTGGSSLLQE | |
| | GQRKAGAAVTTETEVIWAKALPAGTSAQRAELIALTQA | |
| | LKMAEGKKLNVYTNSRYAFATAHIQGEIYRRRGLLTSE | |
| | GKEIKNKDEILALLKALFLPKRLSIIHCPGHQKGHSAEA | |
| | RGNRMANQAARKAAITETPDTSTLLIENSSP | |
| M-MLV RT | TLNIEDEYRLHETSKEPDVSLGSTWLSDFPQAWAETGG | SEQ ID NO: |
| D200N | MGLAVRQAPLIILLKATSTPVSIKQYPMKQEARLGIKPH | 128 |
| P51L | IQRLLDQGILVPCQSPWNTPLLPVKKPGTNDYRPVQDL | |
| S67K | REVNKRVEDIHPTVPNPYNLLSGLPPSHQWYTVLDLKD | |
| T197A | AFFCLRLHPTSQPLFAFEWRDPEMGISGQLTWTRLPQGF | |
| H204R | KNSPALFNEALRRDLADFRIQHPDLILLQYVDDLLLAAT | |
| E302K | SELDCQQGTRALLQTLGNLGYRASAKKAQICQKQVKY | |
| F309N | LGYLLKEGQRWLTEARKETVMGQPTPKTPRQLRKFLG | |
| W313F | TAGNCRLFIPGFAEMAAPLYPLTKPGTLFNWGPDQQKA | |
| T330P | YQEIKQALLTAPALGLPDLTKPFELFVDEKQGYAKGVL | |
| L345G | TQKLGPWRRPVAYLSKKLDPVAAGWPPCLRMVAAIAV | |
| N454K | LTKDAGKLTMGQPLVIGAPHAVEALVKQPPDRWLSKA | |
| D524G | RMTHYQALLLDTDRVQFGPVVALNPATLLPLPEEGLQH | |
| D583N | NCLDILAEAHGTRPDLTDQPLPDADHTWYTGGSSLLQE | |
| H594Q | GQRKAGAAVTTETEVIWAKALPAGTSAQRAELIALTQA | |
| D653N | LKMAEGKKLNVYTNSRYAFATAHIQGEIYRRRGLLTSE | |
| | GKEIKNKDEILALLKALFLPKRLSIIHCPGHQKGHSAEA | |
| | RGNRMANQAARKAAITETPDTSTLLIENSSP | |
| M-MLV RT | TLNIEDEYRLHETSKEPDVSLGSTWLSDFPQAWAETGG | SEQ ID NO: |
| D200N | MGLAVRQAPLIIPLKATSTPVSIKQYPMSQEARLGIKPHI | 34 |
| T330P | QRLLDQGILVPCQSPWNTPLLPVKKPGTNDYRPVQDLR | |
| L603W | EVNKRVEDIHPTVPNPYNLLSGLPPSHQWYTVLDLKDA | |
| T306K | FFCLRLHPTSQPLFAFEWRDPEMGISGQLTWTRLPQGFK | |
| W313F | NSPTLFNEALHRDLADFRIQHPDLILLQYVDDLLLAATS | |
| in PE2 | ELDCQQGTRALLQTLGNLGYRASAKKAQICQKQVKYL | |
| | GYLLKEGQRWLTEARKETVMGQPTPKTPRQLREFLGK | |
| | AGFCRLFIPGFAEMAAPLYPLTKPGTLFNWGPDQQKAY | |
| | QEIKQALLTAPALGLPDLTKPFELFVDEKQGYAKGVLT | |
| | QKLGPWRRPVAYLSKKLDPVAAGWPPCLRMVAAIAVL | |
| | TKDAGKLTMGQPLVILAPHAVEALVKQPPDRWLSNAR | |
| | MTHYQALLLDTDRVQFGPVVALNPATLLPLPEEGLQH | |
| | NCLDILAEAHGTRPDLTDQPLPDADHTWYTDGSSLLQE | |
| | GQRKAGAAVTTETEVIWAKALPAGTSAQRAELIALTQA | |
| | LKMAEGKKLNVYTDSRYAFATAHIHGEIYRRRGWLTS | |
| | EGKEIKNKDEILALLKALFLPKRLSIIHCPGHQKGHSAE | |
| | ARGNRMADQAARKAAITETPDTSTLLIENSSP | |

[0547] In various other embodiments, the prime editors described herein with RT provided as either a fusion partner or in trans) can include a variant RT comprising one or more of the following mutations: P51X, S67X, E69X, L139X, T197X, D200X, H204X, F209X, E302X, T306X, F309X, W313X, T330X, L345X, L435X, N454X, D524X, E562X, D583X, H594X, L603X, E607X, or D653X in the wild type M-MLV RT of SEQ ID NO: 32 or at a corresponding amino acid position in another wild type RT polypeptide sequence, wherein “X” can be any amino acid.

[0548] In various other embodiments, the prime editors described herein (with RT provided as either a fusion partner or in trans) can include a variant RT comprising a P51X mutation in the wild type M-MLV RT of SEQ ID NO: 32 or at a corresponding amino acid position in another wild type RT polypeptide sequence, wherein “X” can be any amino acid. In certain embodiments, X is L.

[0549] In various other embodiments, the prime editors described herein (with RT provided as either a fusion partner or in trans) can include a variant RT comprising a S67X mutation in the wild type M-MLV RT of SEQ ID NO: 32 or at a corresponding amino acid position in another wild type RT polypeptide sequence, wherein “X” can be any amino acid. In certain embodiments, X is K.

[0550] In various other embodiments, the prime editors described herein (with RT provided as either a fusion partner or in trans) can include a variant RT comprising a E69X mutation in the wild type M-MLV RT of SEQ ID NO: 32 or at a corresponding amino acid position in another wild type RT polypeptide sequence, wherein “X” can be any amino acid. In certain embodiments, X is K.

[0551] In various other embodiments, the prime editors described herein (with RT provided as either a fusion partner or in trans) can include a variant RT comprising a L139X mutation in the wild type M-MLV RT of SEQ ID NO: 32 or at a corresponding amino acid position in another wild type RT polypeptide sequence, wherein “X” can be any amino acid. In certain embodiments, X is P.

[0552] In various other embodiments, the prime editors described herein (with RT provided as either a fusion partner or in trans) can include a variant RT comprising a T197X mutation in the wild type M-MLV RT of SEQ ID NO: 32 or at a corresponding amino acid position in another wild type RT polypeptide sequence, wherein “X” can be any amino acid. In certain embodiments, X is A.

[0553] In various other embodiments, the prime editors described herein (with RT provided as either a fusion partner or in trans) can include a variant RT comprising a D200X mutation in the wild type M-MLV RT of SEQ ID NO: 32 or at a corresponding amino acid position in another wild type RT polypeptide sequence, wherein “X” can be any amino acid. In certain embodiments, X is N.

[0554] In various other embodiments, the prime editors described herein (with RT provided as either a fusion partner or in trans) can include a variant RT comprising a H204X mutation in the wild type M-MLV RT of SEQ ID NO: 32 or at a corresponding amino acid position in another wild type RT polypeptide sequence, wherein “X” can be any amino acid. In certain embodiments, X is R.

[0555] In various other embodiments, the prime editors described herein (with RT provided as either a fusion partner or in trans) can include a variant RT comprising a F209X mutation in the wild type M-MLV RT of SEQ ID NO: 32 or at a corresponding amino acid position in another wild type RT polypeptide sequence, wherein “X” can be any amino acid. In certain embodiments, X is N.

[0556] In various other embodiments, the prime editors described herein (with RT provided as either a fusion partner or in trans) can include a variant RT comprising a E302X mutation in the wild type M-MLV RT of SEQ ID NO: 32 or at a corresponding amino acid position in another wild type RT polypeptide sequence, wherein “X” can be any amino acid. In certain embodiments, X is K.

[0557] In various other embodiments, the prime editors described herein (with RT provided as either a fusion partner or in trans) can include a variant RT comprising a E302X mutation in the wild type M-MLV RT of SEQ ID NO: 32 or at a corresponding amino acid position in another wild type RT polypeptide sequence, wherein “X” can be any amino acid. In certain embodiments, X is R.

[0558] In various other embodiments, the prime editors described herein (with RT provided as either a fusion partner or in trans) can include a variant RT comprising a T306X mutation in the wild type M-MLV RT of SEQ ID NO: 32 or at a corresponding amino acid position in another wild type RT polypeptide sequence, wherein “X” can be any amino acid. In certain embodiments, X is K.

[0559] In various other embodiments, the prime editors described herein (with RT provided as either a fusion partner or in trans) can include a variant RT comprising a F309X mutation in the wild type M-MLV RT of SEQ ID NO: 32 or at a corresponding amino acid position in another wild type RT polypeptide sequence, wherein “X” can be any amino acid. In certain embodiments, X is N.

[0560] In various other embodiments, the prime editors described herein (with RT provided as either a fusion partner or in trans) can include a variant RT comprising a W313X mutation in the wild type M-MLV RT of SEQ ID NO: 32 or at a corresponding amino acid position in another wild type RT polypeptide sequence, wherein “X” can be any amino acid. In certain embodiments, X is F.

[0561] In various other embodiments, the prime editors described herein (with RT provided as either a fusion partner or in trans) can include a variant RT comprising a T330X mutation in the wild type M-MLV RT of SEQ ID NO: 32 or at a corresponding amino acid position in another wild type RT polypeptide sequence, wherein “X” can be any amino acid. In certain embodiments, X is P.

[0562] In various other embodiments, the prime editors described herein (with RT provided as either a fusion partner or in trans) can include a variant RT comprising a L345X mutation in the wild type M-MLV RT of SEQ ID NO: 32 or at a corresponding amino acid position in another wild type RT polypeptide sequence, wherein “X” can be any amino acid. In certain embodiments, X is G.

[0563] In various other embodiments, the prime editors described herein (with RT provided as either a fusion partner or in trans) can include a variant RT comprising a L435X mutation in the wild type M-MLV RT of SEQ ID NO: 32 or at a corresponding amino acid position in another wild type RT polypeptide sequence, wherein “X” can be any amino acid. In certain embodiments, X is G.

[0564] In various other embodiments, the prime editors described herein (with RT provided as either a fusion partner or in trans) can include a variant RT comprising a N454X mutation in the wild type M-MLV RT of SEQ ID NO: 32 or at a corresponding amino acid position in another wild type RT polypeptide sequence, wherein “X” can be any amino acid. In certain embodiments, X is K.

[0565] In various other embodiments, the prime editors described herein (with RT provided as either a fusion partner or in trans) can include a variant RT comprising a D524X mutation in the wild type M-MLV RT of SEQ ID NO: 32 or at a corresponding amino acid position in another wild type RT polypeptide sequence, wherein “X” can be any amino acid. In certain embodiments, X is G.

[0566] In various other embodiments, the prime editors described herein (with RT provided as either a fusion partner or in trans) can include a variant RT comprising a E562X mutation in the wild type M-MLV RT of SEQ ID NO: 32 or at a corresponding amino acid position in another wild type RT polypeptide sequence, wherein “X” can be any amino acid. In certain embodiments, X is Q.

[0567] In various other embodiments, the prime editors described herein (with RT provided as either a fusion partner or in trans) can include a variant RT comprising a D583X mutation in the wild type M-MLV RT of SEQ ID NO: 32 or at a corresponding amino acid position in another wild type RT polypeptide sequence, wherein “X” can be any amino acid. In certain embodiments, X is N.

[0568] In various other embodiments, the prime editors described herein (with RT provided as either a fusion partner or in trans) can include a variant RT comprising a H594X mutation in the wild type M-MLV RT of SEQ ID NO: 32 or at a corresponding amino acid position in another wild type RT polypeptide sequence, wherein “X” can be any amino acid. In certain embodiments, X is Q.

[0569] In various other embodiments, the prime editors described herein (with RT provided as either a fusion partner or in trans) can include a variant RT comprising a L603X mutation in the wild type M-MLV RT of SEQ ID NO: 32 or at a corresponding amino acid position in another wild type RT polypeptide sequence, wherein “X” can be any amino acid. In certain embodiments, X is W.

[0570] In various other embodiments, the prime editors described herein (with RT provided as either a fusion partner or in trans) can include a variant RT comprising a E607X mutation in the wild type M-MLV RT of SEQ ID NO: 32 or at a corresponding amino acid position in another wild type RT polypeptide sequence, wherein “X” can be any amino acid. In certain embodiments, X is K.

[0571] In various other embodiments, the prime editors described herein (with RT provided as either a fusion partner or in trans) can include a variant RT comprising a D653X mutation in the wild type M-MLV RT of SEQ ID NO: 32 or at a corresponding amino acid position in another wild type RT polypeptide sequence, wherein “X” can be any amino acid. In certain embodiments, X is N.

[0572] Some exemplary reverse transcriptases that can be fused to napDNAbp proteins or provided as individual proteins according to various embodiments of this disclosure are provided below. Exemplary reverse transcriptases include variants with at least 80%, at least 85%, at least 90%, at least 95% or at least 99% sequence identity to the wild-type enzymes or partial enzymes represented by SEQ ID NOs: 32, 34, 113-128. The prime editor (PE) system described here contemplates any publicly-available reverse transcriptase described or disclosed in any of the following U.S. patents (each of which are incorporated by reference in their entireties): U.S. Pat. Nos. 10,202,658; 10,189,831; 10,150,955; 9,932,567; 9,783,791; 9,580,698; 9,534,201; and 9,458,484, and any variant thereof that can be made using known methods for installing mutations, or known methods for evolving proteins. The following references describe reverse transcriptases in art. Each of their disclosures are incorporated herein by reference in their entireties.
[0573] Herzig, E., Voronin, N., Kucherenko, N. & Hizi, A. A Novel Leu92 Mutant of HIV-1 Reverse Transcriptase with a Selective Deficiency in Strand Transfer Causes a Loss of Viral Replication. J. Virol. 89, 8119-8129 (2015).
[0574] Mohr, G. et al. A Reverse Transcriptase-Cas1 Fusion Protein Contains a Cas6 Domain Required for Both CRISPR RNA Biogenesis and RNA Spacer Acquisition. Mol. Cell 72, 700-714.e8 (2018).
[0575] Zhao, C., Liu, F. & Pyle, A. M. An ultraprocessive, accurate reverse transcriptase encoded by a metazoan group II intron. RNA 24, 183-195 (2018).
[0576] Zimmerly, S. & Wu, L. An Unexplored Diversity of Reverse Transcriptases in Bacteria. Microbiol Spectr 3, MDNA3-0058-2014 (2015).
[0577] Ostertag, E. M. & Kazazian Jr, H. H. Biology of Mammalian L1 Retrotransposons. Annual Review of Genetics 35, 501-538 (2001).
[0578] Perach, M. & Hizi, A. Catalytic Features of the Recombinant Reverse Transcriptase of Bovine Leukemia Virus Expressed in Bacteria. Virology 259, 176-189 (1999).
[0579] Lim, D. et al. Crystal structure of the moloney murine leukemia virus RNase H domain. J. Virol. 80, 8379-8389 (2006).
[0580] Zhao, C. & Pyle, A. M. Crystal structures of a group II intron maturase reveal a missing link in spliceosome evolution. Nature Structural & Molecular Biology 23, 558-565 (2016).
[0581] Griffiths, D. J. Endogenous retroviruses in the human genome sequence. Genome Biol. 2, REVIEWS1017 (2001).
[0582] Baranauskas, A. et al. Generation and characterization of new highly thermostable and processive M-MuLV reverse transcriptase variants. Protein Eng Des Sel 25, 657-668 (2012).
[0583] Zimmerly, S., Guo, H., Perlman, P. S. & Lambowltz, A. M. Group II intron mobility occurs by target DNA-primed reverse transcription. Cell 82, 545-554 (1995).
[0584] Feng, Q., Moran, J. V., Kazazian, H. H. & Boeke, J. D. Human L1 retrotransposon encodes a conserved endonuclease required for retrotransposition. Cell 87, 905-916 (1996).
[0585] Berkhout, B., Jebbink, M. & Zsiros, J. Identification of an Active Reverse Transcriptase Enzyme Encoded by a Human Endogenous HERV-K Retrovirus. Journal of Virology 73, 2365-2375 (1999).
[0586] Kotewicz, M. L., Sampson, C. M., D'Alessio, J. M. & Gerard, G. F. Isolation of cloned Moloney murine leukemia virus reverse transcriptase lacking ribonuclease H activity. Nucleic Acids Res 16, 265-277 (1988).
[0587] Arezi, B. & Hogrefe, H. Novel mutations in Moloney Murine Leukemia Virus reverse transcriptase increase thermostability through tighter binding to template-primer. Nucleic Acids Res 37, 473-481 (2009).
[0588] Blain, S. W. & Goff, S. P. Nuclease activities of Moloney murine leukemia virus reverse transcriptase. Mutants with altered substrate specificities. J. Biol. Chem. 268, 23585-23592 (1993).
[0589] Xiong, Y. & Eickbush, T. H. Origin and evolution of retroelements based upon their reverse transcriptase sequences. EMBO J 9, 3353-3362 (1990).
[0590] Herschhorn, A. & Hizi, A. Retroviral reverse transcriptases. Cell. Mol. Life Sci. 67, 2717-2747 (2010).
[0591] Taube, R., Loya, S., Avidan, O., Perach, M. & Hizi, A. Reverse transcriptase of mouse mammary tumour virus: expression in bacteria, purification and biochemical characterization. Biochem. J. 329 (Pt 3), 579-587 (1998).
[0592] Liu, M. et al. Reverse Transcriptase-Mediated Tropism Switching in Bordetella Bacteriophage. Science 295, 2091-2094 (2002).
[0593] Luan, D. D., Korman, M. H., Jakubczak, J. L. & Eickbush, T. H. Reverse transcription of R2Bm RNA is primed by a nick at the chromosomal target site: a mechanism for non-LTR retrotransposition. Cell 72, 595-605 (1993).
[0594] Nottingham, R. M. et al. RNA-seq of human reference RNA samples using a thermostable group II intron reverse transcriptase. RNA 22, 597-613 (2016).
[0595] Telesnitsky, A. & Goff, S. P. RNase H domain mutations affect the interaction between Moloney murine leukemia virus reverse transcriptase and its primer-template. Proc. Natl. Acad. Sci. U.S.A. 90, 1276-1280 (1993).
[0596] Halvas, E. K., Svarovskaia, E. S. & Pathak, V. K. Role of Murine Leukemia Virus Reverse Transcriptase Deoxyribonucleoside Triphosphate-Binding Site in Retroviral Replication and In Vivo Fidelity. Journal of Virology 74, 10349-10358 (2000).
[0597] Nowak, E. et al. Structural analysis of monomeric retroviral reverse transcriptase in complex with an RNA/DNA hybrid. Nucleic Acids Res 41, 3874-3887 (2013).
[0598] Stamos, J. L., Lentzsch, A. M. & Lambowitz, A. M. Structure of a Thermostable Group II Intron Reverse Transcriptase with Template-Primer and Its Functional and Evolutionary Implications. Molecular Cell 68, 926-939.e4 (2017).
[0599] Das, D. & Georgiadis, M. M. The Crystal Structure of the Monomeric Reverse Transcriptase from Moloney Murine Leukemia Virus. Structure 12, 819-829 (2004).
[0600] Avidan, O., Meer, M. E., Oz, I. & Hizi, A. The processivity and fidelity of DNA synthesis exhibited by the reverse transcriptase of bovine leukemia virus. European Journal of Biochemistry 269, 859-867 (2002).
[0601] Gerard, G. F. et al. The role of template-primer in protection of reverse transcriptase from thermal inactivation. Nucleic Acids Res 30, 3118-3129 (2002).
[0602] Monot, C. et al. The Specificity and Flexibility of L1 Reverse Transcription Priming at Imperfect T-Tracts. PLOS Genetics 9, e1003499 (2013).
[0603] Mohr, S. et al. Thermostable group II intron reverse transcriptase fusion proteins and their use in cDNA synthesis and next-generation RNA sequencing. RNA 19, 958-970 (2013).

[0604] Any of the references noted above which relate to reverse transcriptases are hereby incorporated by reference in their entireties, if not already stated so.

### [4] Prime Editors

[0605] The prime editor (PE) system described herein refers to a system comprising (A) at least two proteins: (1) a napDNAbp (e.g., a Cas9 nickase) and (2) a polymerase (e.g., DNA-dependent DNA polymerase or RNA-dependent DNA polymerase, such as, reverse transcriptase) and (B) an engineered pegRNA comprising at least one performance-enhancing modification relative to a canonical pegRNA. The napDNAbp and the polymerase components may be provided separately, i.e., in trans to one another, or may be provided as a fusion protein whereby the napDNAbp and polymerase components are coupled, e.g., via a polypeptide linker.

[0606] The application contemplates any suitable napDNAbp and polymerase (e.g., DNA-dependent DNA polymerase or RNA-dependent DNA polymerase, such as, reverse transcriptase) to be combined in a single fusion protein for use with the herein disclosed engineered pegRNAs. Examples of napDNAbps and polymerases (e.g., DNA-dependent DNA polymerase or RNA-dependent DNA polymerase, such as, reverse transcriptase) are each defined herein. Since polymerases are well-known in the art, and the amino acid sequences are readily available, this disclosure is not meant in any way to be limited to those specific polymerases identified herein.

[0607] In various embodiments, the fusion proteins may comprise any suitable structural configuration. For example, the fusion protein may comprise from the N-terminus to the C-terminus direction, a napDNAbp fused to a polymerase (e.g., DNA-dependent DNA polymerase or RNA-dependent DNA polymerase, such as, reverse transcriptase). In other embodiments, the fusion protein may comprise from the N-terminus to the C-terminus direction, a polymerase (e.g., a reverse transcriptase) fused to a napDNAbp. The fused domain may optionally be joined by a linker, e.g., an amino acid sequence. In other embodiments, the fusion proteins may comprise the structure NH₂-[napDNAbp]-[polymerase]-COOH; or NH₂-[polymerase]-[napDNAbp]-COOH, wherein each instance of “]-[” indicates the presence of an optional linker sequence. In embodiments wherein the polymerase is a reverse transcriptase, the fusion proteins may comprise the structure NH₂-[napDNAbp]-[RT]-COOH; or NH₂—[RT]-[napDNAbp]-COOH, wherein each instance of “]-[” indicates the presence of an optional linker sequence.

[0608] An exemplary fusion protein is depicted in FIG. 14, which shows a fusion protein comprising an MLV reverse transcriptase (“MLV-RT”) fused to a nickase Cas9 (“Cas9(H840A)”) via a linker sequence. This example is not intended to limit scope of fusion proteins that may be utilized for the prime editor (PE) system described herein.

[0609] In various embodiments, the prime editor may have the following amino acid sequence (referred to herein as “PE1”), which includes a Cas9 variant comprising an H840A mutation (i.e., a Cas9 nickase) and an M-MLV RT wild type, as well as an N-terminal NLS sequence (19 amino acids) and an amino acid linker (32 amino acids) that joins the C-terminus of the Cas9 nickase domain to the N-terminus of the RT domain. The PE1 fusion protein has the following structure: [NLS]-[Cas9(H840A)]-[linker]-[MMLV_RT(wt)]. The amino acid sequence of PE1 and its individual components are as follows:

| DESCRIPTION | SEQUENCE |
|---|---|
| PE1 FUSION | MKRTADGSEFESPKKKRKVDKKYSIGLDIGTNSVGWAVITDEYKVPSK |
| PROTEIN | KFKVLGNTDRHSIKKNLIGALLFDSGETAEATRLKRTARRRYTRRK |
| CAS9(H840A)- | NRICYLQEIFSNEMAKVDDSFFHRLEESFLVEEDKKHERHPIFGNIVD |
| MMLV_RT(WT) | EVAYHEKYPTIYHLRKKLVDSTDKADLRLIYLALAHMIKFRGHFLIE |
| | GDLNPDNSDVDKLFIQLVQTYNQLFEENPINASGVDAKAILSARLSKS |
| | RRLENLIAQLPGEKKNGLFGNLIALSLGLTPNFKSNFDLAEDAKLQL |
| | SKDTYDDDLDNLLAQIGDQYADLFLAAKNLSDAILLSDILRVNTEITK |
| | APLSASMIKRYDEHHQDLTLLKALVRQQLPEKYKEIFFDQSKNGYA |
| | GYIDGGASQEEFYKFIKPILEKMDGTEELLVKLNREDLLRKQRTFDN |
| | GSIPHQIHLGELHAILRRQEDFYPFLKDNREKIEKILTFRIPYYVGPL |
| | ARGNSRFAWMTRKSEETITPWNFEEVVDKGASAQSFIERMTNFDKN |
| | LPNEKVLPKHSLLYEYFTVYNELTKVKYVTEGMRKPAFLSGEQKKA |
| | IVDLLFKTNRKVTVKQLKEDYFKKIECFDSVEISGVEDRFNASLGTY |
| | HDLLKIIKDKDFLDNEENEDILEDIVLTLTLFEDREMIEERLKTYAHL |
| | FDDKVMKQLKRRRYTGWGRLSRKLINGIRDKQSGKTILDFLKSDGF |
| | ANRNFMQLIHDDSLTFKEDIQKAQVSGQGDSLHEHIANLAGSPAIKK |
| | GILQTVKVVDELVKVMGRHKPENIVIEMARENQTTQKGQKNSRER |
| | MKRIEEGIKELGSQILKEHPVENTQLQNEKLYLYYLQNGRDMYVDQ |
| | ELDINRLSDYDVDAIVPQSFLKDDSIDNKVLTRSDKNRGKSDNVPSEE |
| | VVKKMKNYWRQLLNAKLITQRKFDNLTKAERGGLSELDKAGFIKR |
| | QLVETRQITKHVAQILDSRMNTKYDENDKLIREVKVITLKSKLVSDF |
| | RKDFQFYKVREINNYHHAHDAYLNAVVGTALIKKYPKLESEFVYGD |
| | YKVYDVRKMIAKSEQEIGKATAKYFFYSNIMNFFKTEITLANGEIRK |
| | RPLIETNGETGEIVWDKGRDFATVRKVLSMPQVNIVKKTEVQTGGF |
| | SKESILPKRNSDKLIARKKDWDPKKYGGFDSPTVAYSVLVVAKVEKG |
| | KSKKLKSVKELLGITIMERSSFEKNPIDFLEAKGYKEVKKDLIIKLPK |
| | YSLFELENGRKRMLASAGELQKGNELALPSKYVNFLYLASHYEKLK |
| | GSPEDNEQKQLFVEQHKHYLDEIIEQISEFSKRVILADANLDKVLSAY |
| | NKHRDKPIREQAENIIHLFTLTNLGAPAAFKYFDTTIDRKRYTSTKEV |
| | LDATLIHQSITGLYETRIDLSQLGGDSGGSSGGSSGSETPGTSESATPE |
| | SSGGSSGGSSTLNIEDEYRLHETSKEPDVSLGSTWLSDFPQAWAETGGMGL |
| | AVRQAPLIIPLKATSTPVSIKQYPMSQEARLGIKPHIQRLLDQGILVPCQSPWN |
| | TPLLPVKKPGTNDYRPVQDLREVNKRVEDIHPTVPNPYNLLSGLPPSHQWYT |
| | VLDLKDAFFCLRLHPTSQPLFAFEWRDPEMGISGQLTWTRLPQGFKNSPTL |
| | FDEALHRDLADFRIQHPDLILLQYVDDLLLAATSELDCQQGTRALLQTLGNL |
| | GYRASAKKAQICQKQVKYLGYLLKEGQRWLTEARKETVMGQPTPKTPRQLR |
| | EFLGTAGFCRLWIPGFAEMAAPLYPLTKTGTLFNWGPDQQKAYQEIKQALLT |
| | APALGLPDLTKPFELFVDEKQGYAKGVLTQKLGPWRRPVAYLSKKLDPVAAG |
| | WPPCLRMVAAIAVLTKDAGKLTMGQPLVILAPHAVEALVKQPPDRWLSNAR |
| | MTHYQALLLDTDRVQFGPVVALNPATLLPLPEEGLQHNCLDILAEAHGTRPD |
| | LTDQPLPDADHTWYTDGSSLLQEGQRKAGAAVTTETEVIWAKALPAGTSAQR |
| | AELIALTQALKMAEGKKLNVYTDSRYAFATAHIHGEIYRRRGLLTSEGKEIKNK |
| | DEILALLKALFLPKRLSIIHCPGHQKGHSAEARGNRMADQAARKAAITETPD |
| | TSTLLIENSSPSGGSKRTADGSEFEPKKKRKV (SEQ ID NO: 28) |
| | KEY: |
| | NUCLEAR LOCALIZATION SEQUENCE (NLS) TOP: (SEQ ID NO: 29), |
| | BOTTOM: (SEQ ID NO: 30) |
| | CAS9(H840A)(SEQ ID NO: 31) |
| | 33-AMINO ACID LINKER (SEQ ID NO: 11) |
| | M-MLV REVERSE TRANSCRIPTASE (SEQ ID NO: 32) |
| PE1 - N- | MKRTADGSEFESPKKKRKV (SEQ ID NO: 29) |
| TERMINAL | |
| NLS | |
| PE1 - CAS9 | DKKYSIGLDIGTNSVGWAVITDEYKVPSKKFKVLGNTDRHSIKKNLIGAL |
| (H840A)(MET | LFDSGETAEATRLKRTARRRYTRRKNRICYLQEIFSNEMAKVDDSFFHRL |
| MINUS) | EESFLVEEDKKHERHPIFGNIVDEVAYHEKYPTIYHLRKKLVDSTDKADL |
| | RLIYLALAHMIKFRGHFLIEGDLNPDNSDVDKLFIQLVQTYNQLFEENPI |
| | NASGVDAKAILSARLSKSRRLENLIAQLPGEKKNGLFGNLIALSLGLTPN |
| | FKSNFDLAEDAKLQLSKDTYDDDLDNLLAQIGDQYADLFLAAKNLSDAI |
| | LLSDILRVNTEITKAPLSASMIKRYDEHHQDLTLLKALVRQQLPEKYKEIF |
| | FDQSKNGYAGYIDGGASQEEFYKFIKPILEKMDGTEELLVKLNREDLLR |
| | KQRTFDNGSIPHQIHLGELHAILRRQEDFYPFLKDNREKIEKILTFRIPYYV |
| | GPLARGNSRFAWMTRKSEETITPWNFEEVVDKGASAQSFIERMTNFDKN |
| | LPNEKVLPKHSLLYEYFTVYNELTKVKYVTEGMRKPAFLSGEQKKAIVD |
| | LLFKTNRKVTVKQLKEDYFKKIECFDSVEISGVEDRFNASLGTYHDLLKI |
| | IKDKDFLDNEENEDILEDIVLTLTLFEDREMIEERLKTYAHLFDDKVMKQ |
| | LKRRRYTGWGRLSRKLINGIRDKQSGKTILDFLKSDGFANRNFMQLIHD |
| | DSLTFKEDIQKAQVSGQGDSLHEHIANLAGSPAIKKGILQTVKVVDELVK |
| | VMGRHKPENIVIEMARENQTTQKGQKNSRERMKRIEEGIKELGSQILKE |
| | HPVENTQLQNEKLYLYYLQNGRDMYVDQELDINRLSDYDVDAIVPQSF |
| | LKDDSIDNKVLTRSDKNRGKSDNVPSEEVVKKMKNYWRQLLNAKLITQ |
| | RKFDNLTKAERGGLSELDKAGFIKRQLVETRQITKHVAQILDSRMNTKY |
| | DENDKLIREVKVITLKSKLVSDFRKDFQFYKVREINNYHHAHDAYLNAV |
| | VGTALIKKYPKLESEFVYGDYKVYDVRKMIAKSEQEIGKATAKYFFYSN |
| | IMNFFKTEITLANGEIRKRPLIETNGETGEIVWDKGRDFATVRKVLSMPQ |
| | VNIVKKTEVQTGGFSKESILPKRNSDKLIARKKDWDPKKYGGFDSPTVA |
| | YSVLVVAKVEKGKSKKLKSVKELLGITIMERSSFEKNPIDFLEAKGYKEV |
| | KKDLIIKLPKYSLFELENGRKRMLASAGELQKGNELALPSKYVNFLYLA |
| | SHYEKLKGSPEDNEQKQLFVEQHKHYLDEIIEQISEFSKRVILADANLDK |
| | VLSAYNKHRDKPIREQAENIIHLFTLTNLGAPAAFKYFDTTIDRKRYTSTK |
| | EVLDATLIHQSITGLYETRIDLSQLGGD (SEQ ID NO: 130) |
| PE1 - LINKER | SGGSSGGSSGSETPGTSESATPESSGGSSGGSS (SEQ ID NO: 11) |
| BETWEEN | |
| CAS9 | |
| DOMAIN AND | |
| RT DOMAIN | |
| (33 AMINO | |
| ACIDS) | |
| PE1 - M-MLV | TLNIEDEYRLHETSKEPDVSLGSTWLSDFPQAWAETGGMGLAVRQAPLII |
| RT | PLKATSTPVSIKQYPMSQEARLGIKPHIQRLLDQGILVPCQSPWNTPLLPV |
| | KKPGTNDYRPVQDLREVNKRVEDIHPTVPNPYNLLSGLPPSHQWYTVL |
| | DLKDAFFCLRLHPTSQPLFAFEWRDPEMGISGQLTWTRLPQGFKNSPTLF |
| | DEALHRDLADFRIQHPDLILLQYVDDLLLAATSELDCQQGTRALLQTLG |
| | NLGYRASAKKAQICQKQVKYLGYLLKEGQRWLTEARKETVMGQPTPK |
| | TPRQLREFLGTAGFCRLWIPGFAEMAAPLYPLTKTGTLFNWGPDQQKAY |
| | QEIKQALLTAPALGLPDLTKPFELFVDEKQGYAKGVLTQKLGPWRRPVA |
| | YLSKKLDPVAAGWPPCLRMVAAIAVLTKDAGKLTMGQPLVILAPHAVEA |
| | LVKQPPDRWLSNARMTHYQALLLDTDRVQFGPVVALNPATLLPLPEEGL |
| | QHNCLDILAEAHGTRPDLTDQPLPDADHTWYTDGSSLLQEGQRKAGAA |
| | VTTETEVIWAKALPAGTSAQRAELIALTQALKMAEGKKLNVYTDSRYAF |
| | ATAHIHGEIYRRRGLLTSEGKEIKNKDEILALLKALFLPKRLSIIHCPGHQK |
| | GHSAEARGNRMADQAARKAAITETPDTSTLLIENSSP (SEQ ID NO: 132) |
| PE1 - C- | SGGSKRTADGSEFEPKKKRKV (SEQ ID NO: 30) |
| TERMINAL | |
| NLS | |

[0610] In another embodiment, the prime editor may have the following amino acid sequence (referred to herein as “PE2”), which includes a Cas9 variant comprising an H840A mutation (i.e., a Cas9 nickase) and an M-MLV RT comprising mutations D200N, T330P, L603W, T306K, and W313F, as well as an N-terminal NLS sequence (19 amino acids) and an amino acid linker (33 amino acids) that joins the C-terminus of the Cas9 nickase domain to the N-terminus of the RT domain. The PE2 fusion protein has the following structure: [NLS]-[Cas9(HS40A)]-[linker]-[MMLV-RT(D200N)(T330P)(L603W)(T306K)(W313F)]. The amino acid sequence of PE2 is as follows:

| | |
|---|---|
| PE2 FUSION | MKRTADGSEFESPKKKRKVDKKYSIGLDIGTNSVGWAVITDEYKVPS |
| PROTEIN | KKFKVLGNTDRHSIKKNLIGALLFDSGETAEATRLKRTARRRYTRR |
| CAS9(H840A)- | KNRICYLQEIFSNEMAKVDDSFFHRLEESFLVEEDKKHERHPIFGNI |
| MMLV_RT | VDEVAYHEKYPTIYHLRKKLVDSTDKADLRLIYLALAHMIKFRGHF |
| D200N | LIEGDLNPDNSDVDKLFIQLVQTYNQLFEENPINASGVDAKAILSAR |
| T330P | LSKSRRLENLIAQLPGEKKNGLFGNLIALSLGLTPNFKSNFDLAEDA |
| L603W | KLQLSKDTYDDDLDNLLAQIGDQYADLFLAAKNLSDAILLSDILRV |
| T306K | NTEITKAPLSASMIKRYDEHHQDLTLLKALVRQQLPEKYKEIFFDQS |
| W313F | KNGYAGYIDGGASQEEFYKFIKPILEKMDGTEELLVKLNREDLLRK |
| | QRTFDNGSIPHQIHLGELHAILRRQEDFYPFLKDNREKIEKILTFRIP |
| | YYVGPLARGNSRFAWMTRKSEETITPWNFEEVVDKGASAQSFIER |
| | MTNFDKNLPNEKVLPKHSLLYEYFTVYNELTKVKYVTEGMRKPAF |
| | LSGEQKKAIVDLLFKTNRKVTVKQLKEDYFKKIECFDSVEISGVED |
| | RFNASLGTYHDLLKIIKDKDFLDNEENEDILEDIVLTLTLFEDREMIE |
| | ERLKTYAHLFDDKVMKQLKRRRYTGWGRLSRKLINGIRDKQSGK |
| | TILDFLKSDGFANRNFMQLIHDDSLTFKEDIQKAQVSGQGDSLHEHI |
| | ANLAGSPAIKKGILQTVKVVDELVKVMGRHKPENIVIEMARENQTT |
| | QKGQKNSRERMKRIEEGIKELGSQILKEHPVENTQLQNEKLYLYYL |
| | QNGRDMYVDQELDINRLSDYDVDAIVPQSFLKDDSIDNKVLTRSDK |
| | NRGKSDNVPSEEVVKKMKNYWRQLLNAKLITQRKFDNLTKAERG |
| | GLSELDKAGFIKRQLVETRQITKHVAQILDSRMNTKYDENDKLIRE |
| | VKVITLKSKLVSDFRKDFQFYKVREINNYHHAHDAYLNAVVGTALI |
| | KKYPKLESEFVYGDYKVYDVRKMIAKSEQEIGKATAKYFFYSNIMN |
| | FFKTEITLANGEIRKRPLIETNGETGEIVWDKGRDFATVRKVLSMP |
| | QVNIVKKTEVQTGGFSKESILPKRNSDKLIARKKDWDPKKYGGFDS |
| | PTVAYSVLVVAKVEKGKSKKLKSVKELLGITIMERSSFEKNPIDFLE |
| | AKGYKEVKKDLIIKLPKYSLFELENGRKRMLASAGELQKGNELAL |
| | PSKYVNFLYLASHYEKLKGSPEDNEQKQLFVEQHKHYLDEIIEQISE |
| | FSKRVILADANLDKVLSAYNKHRDKPIREQAENIIHLFTLTNLGAPA |
| | AFKYFDTTIDRKRYTSTKEVLDATLIHQSITGLYETRIDLSQLGGDS |
| | GGSSGGSSGSETPGTSESATPESSGGSSGGSSTLNIEDEYRLHETSKEPD |
| | VSLGSTWLSDFPQAWAETGGMGLAVRQAPLIIPLKATSTPVSIKQYPMSQEA |
| | RLGIKPHIQRLLDQGILVPCQSPWNTPLLPVKKPGTNDYRPVQDLREVNKR |
| | VEDIHPTVPNPYNLLSGLPPSHQWYTVLDLKDAFFCLRLHPTSQPLFAFEW |
| | RDPEMGISGQLTWTRLPQGFKNSPTLFNEALHRDLADFRIQHPDLILLQYV |
| | DDLLLAATSELDCQQGTRALLQTLGNLGYRASAKKAQICQKQVKYLGYLLK |
| | EGQRWLTEARKETVMGQPTPKTPRQLREFLGKAGFCRLFIPGFAEMAAPLY |
| | PLTKPGTLFNWGPDQQKAYQEIKQALLTAPALGLPDLTKPFELFVDEKQGY |
| | AKGVLTQKLGPWRRPVAYLSKKLDPVAAGWPPCLRMVAAIAVLTKDAGKLT |
| | MGQPLVILAPHAVEALVKQPPDRWLSNARMTHYQALLLDTDRVQFGPVVA |
| | LNPATLLPLPEEGLQHNCLDILAEAHGTRPDLTDQPLPDADHTWYTDGSSL |
| | LQEGQRKAGAAVTTETEVIWAKALPAGTSAQRAELIALTQALKMAEGKKLNV |
| | YTDSRYAFATAHIHGEIYRRRGWLTSEGKEIKNKDEILALLKALFLPKRLSIIH |
| | CPGHQKGHSAEARGNRMADQAARKAAITETPDTSTLLIENSSPSGGSKRTA |
| | DGSEFEPKKKRKV (SEQ ID NO: 33) |
| | KEY: |
| | NUCLEAR LOCALIZATION SEQUENCE (NLS) TOP: (SEQ ID NO: 29), |
| | BOTTOM: (SEQ ID NO: 30) |
| | CAS9(H840A)(SEQ ID NO: 31) |
| | 33-AMINO ACID LINKER (SEQ ID NO: 11) |
| | M-MLV REVERSE TRANSCRIPTASE (SEQ ID NO: 34) |
| PE2 - N- | MKRTADGSEFESPKKKRKV (SEQ ID NO: 29) |
| TERMINAL | |
| NLS | |
| PE2 - CAS9 | DKKYSIGLDIGTNSVGWAVITDEYKVPSKKFKVLGNTDRHSIKKNLIGA |
| (H840A)(MET | LLFDSGETAEATRLKRTARRRYTRRKNRICYLQEIFSNEMAKVDDSFFH |
| MINUS) | RLEESFLVEEDKKHERHPIFGNIVDEVAYHEKYPTIYHLRKKLVDSTDKA |
| | DLRLIYLALAHMIKFRGHFLIEGDLNPDNSDVDKLFIQLVQTYNQLFEE |
| | NPINASGVDAKAILSARLSKSRRLENLIAQLPGEKKNGLFGNLIALSLGL |
| | TPNFKSNFDLAEDAKLQLSKDTYDDDLDNLLAQIGDQYADLFLAAKNL |
| | SDAILLSDILRVNTEITKAPLSASMIKRYDEHHQDLTLLKALVRQQLPEK |
| | YKEIFFDQSKNGYAGYIDGGASQEEFYKFIKPILEKMDGTEELLVKLNR |
| | EDLLRKQRTFDNGSIPHQIHLGELHAILRRQEDFYPFLKDNREKIEKILTF |
| | RIPYYVGPLARGNSRFAWMTRKSEETITPWNFEEVVDKGASAQSFIERM |
| | TNFDKNLPNEKVLPKHSLLYEYFTVYNELTKVKYVTEGMRKPAFLSGE |
| | QKKAIVDLLFKTNRKVTVKQLKEDYFKKIECFDSVEISGVEDRFNASLG |
| | TYHDLLKIIKDKDFLDNEENEDILEDIVLTLTLFEDREMIEERLKTYAHLF |
| | DDKVMKQLKRRRYTGWGRLSRKLINGIRDKQSGKTILDFLKSDGFANR |
| | NFMQLIHDDSLTFKEDIQKAQVSGQGDSLHEHIANLAGSPAIKKGILQT |
| | VKVVDELVKVMGRHKPENIVIEMARENQTTQKGQKNSRERMKRIEEGI |
| | KELGSQILKEHPVENTQLQNEKLYLYYLQNGRDMYVDQELDINRLSDY |
| | DVDAIVPQSFLKDDSIDNKVLTRSDKNRGKSDNVPSEEVVKKMKNYW |
| | RQLLNAKLITQRKFDNLTKAERGGLSELDKAGFIKRQLVETRQITKHVA |
| | QILDSRMNTKYDENDKLIREVKVITLKSKLVSDFRKDFQFYKVREINNY |
| | HHAHDAYLNAVVGTALIKKYPKLESEFVYGDYKVYDVRKMIAKSEQEI |
| | GKATAKYFFYSNIMNFFKTEITLANGEIRKRPLIETNGETGEIVWDKGRD |
| | FATVRKVLSMPQVNIVKKTEVQTGGFSKESILPKRNSDKLIARKKDWDP |
| | KKYGGFDSPTVAYSVLVVAKVEKGKSKKLKSVKELLGITIMERSSFEKN |
| | PIDFLEAKGYKEVKKDLIIKLPKYSLFELENGRKRMLASAGELQKGNEL |
| | ALPSKYVNFLYLASHYEKLKGSPEDNEQKQLFVEQHKHYLDEIIEQISEF |
| | SKRVILADANLDKVLSAYNKHRDKPIREQAENIIHLFTLTNLGAPAAFKY |
| | FDTTIDRKRYTSTKEVLDATLIHQSITGLYETRIDLSQLGGD (SEQ ID NO: |
| | 31) |
| PE2 - LINKER | SGGSSGGSSGSETPGTSESATPESSGGSSGGSS (SEQ ID NO: 11) |
| BETWEEN | |
| CAS9 | |
| DOMAIN | |
| AND RT | |
| DOMAIN (33 | |
| AMINO | |
| ACIDS) | |
| PE2 | TLNIEDEYRLHETSKEPDVSLGSTWLSDFPQAWAETGGMGLAVRQAPLI |
| MMLV_RT | IPLKATSTPVSIKQYPMSQEARLGIKPHIQRLLDQGILVPCQSPWNTPLLP |
| D200N | VKKPGTNDYRPVQDLREVNKRVEDIHPTVPNPYNLLSGLPPSHQWYTV |
| T330P | LDLKDAFFCLRLHPTSQPLFAFEWRDPEMGISGQLTWTRLPQGFKNSPT |
| L603W | LFNEALHRDLADFRIQHPDLILLQYVDDLLLAATSELDCQQGTRALLQT |
| T306K | LGNLGYRASAKKAQICQKQVKYLGYLLKEGQRWLTEARKETVMGQPT |
| W313F | PKTPRQLREFLGKAGFCRLFIPGFAEMAAPLYPLTKPGTLFNWGPDQQK |
| | AYQEIKQALLTAPALGLPDLTKPFELFVDEKQGYAKGVLTQKLGPWRRP |
| | VAYLSKKLDPVAAGWPPCLRMVAAIAVLTKDAGKLTMGQPLVILAPHA |
| | VEALVKQPPDRWLSNARMTHYQALLLDTDRVQFGPVVALNPATLLPLP |
| | EEGLQHNCLDILAEAHGTRPDLTDQPLPDADHTWYTDGSSLLQEGQRK |
| | AGAAVTTETEVIWAKALPAGTSAQRAELIALTQALKMAEGKKLNVYTD |
| | SRYAFATAHIHGEIYRRRGWLTSEGKEIKNKDEILALLKALFLPKRLSIIH |
| | CPGHQKGHSAEARGNRMADQAARKAAITETPDTSTLLIENSSP (SEQ ID |
| | NO: 34) |
| PE2 - C- | SGGSKRTADGSEFEPKKKRKV (SEQ ID NO: 30) |
| TERMINAL | |
| NLS | |

[0611] In still other embodiments, the prime editor may have the following amino acid sequences:

| | |
|---|---|
| PRIME | MKRTADGSEFESPKKKRKVTLNIEDEYRLHETSKEPDVSLGSTWLSDFPQA |
| EDITOR | WAETGGMGLAVRQAPLIIPLKATSTPVSIKQYPMSQEARLGIKPHIQRLLDQG |
| MMLV_RT(WT)- | ILVPCQSPWNTPLLPVKKPGTNDYRPVQDLREVNKRVEDIHPTVPNPYNLLS |
| 32AA- | GLPPSHQWYTVLDLKDAFFCLRLHPTSQPLFAFEWRDPEMGISGQLTWTRL |
| CAS9(H840A) | PQGFKNSPTLFDEALHRDLADFRIQHPDLILLQYVDDLLLAATSELDCQQGT |
| | RALLQTLGNLGYRASAKKAQICQKQVKYLGYLLKEGQRWLTEARKETVMGQ |
| | PTPKTPRQLREFLGTAGFCRLWIPGFAEMAAPLYPLTKTGTLFNWGPDQQK |
| | AYQEIKQALLTAPALGLPDLTKPFELFVDEKQGYAKGVLTQKLGPWRRPVAY |
| | LSKKLDPVAAGWPPCLRMVAAIAVLTKDAGKLTMGQPLVILAPHAVEALVKQ |
| | PPDRWLSNARMTHYQALLLDTDRVQFGPVVALNPATLLPLPEEGLQHNCLDI |
| | LAEAHGTRPDLTDQPLPDADHTWYTDGSSLLQEGQRKAGAAVTTETEVIWA |
| | KALPAGTSAQRAELIALTQALKMAEGKKLNVYTDSRYAFATAHIHGEIYRRRGL |
| | LTSEGKEIKNKDEILALLKALFLPKRLSIIHCPGHQKGHSAEARGNRMADQA |
| | ARKAAITETPDTSTLLIENSSPSGGSSGGSSGSETPGTSESATPESSGGSSG |
| | GSSDKKYSIGLDIGTNSVGWAVITDEYKVPSKKFKVLGNTDRHSIKK |
| | NLIGALLFDSGETAEATRLKRTARRRYTRRKNRICYLQEIFSNEMAK |
| | VDDSFFHRLEESFLVEEDKKHERHPIFGNIVDEVAYHEKYPTIYHLRK |
| | KLVDSTDKADLRLIYLALAHMIKFRGHFLIEGDLNPDNSDVDKLFIQ |
| | LVQTYNQLFEENPINASGVDAKAILSARLSKSRRLENLIAQLPGEKK |
| | NGLFGNLIALSLGLTPNFKSNFDLAEDAKLQLSKDTYDDDLDNLLAQ |
| | IGDQYADLFLAAKNLSDAILLSDILRVNTEITKAPLSASMIKRYDEHH |
| | QDLTLLKALVRQQLPEKYKEIFFDQSKNGYAGYIDGGASQEEFYKFI |
| | KPILEKMDGTEELLVKLNREDLLRKQRTFDNGSIPHQIHLGELHAIL |
| | RRQEDFYPFLKDNREKIEKILTFRIPYYVGPLARGNSRFAWMTRKSE |
| | ETITPWNFEEVVDKGASAQSFIERMTNFDKNLPNEKVLPKHSLLYEY |
| | FTVYNELTKVKYVTEGMRKPAFLSGEQKKAIVDLLFKTNRKVTVK |
| | QLKEDYFKKIECFDSVEISGVEDRFNASLGTYHDLLKIIKDKDFLDN |
| | EENEDILEDIVLTLTLFEDREMIEERLKTYAHLFDDKVMKQLKRRRY |
| | TGWGRLSRKLINGIRDKQSGKTILDFLKSDGFANRNFMQLIHDDSLT |
| | FKEDIQKAQVSGQGDSLHEHIANLAGSPAIKKGILQTVKVVDELVKV |
| | MGRHKPENIVIEMARENQTTQKGQKNSRERMKRIEEGIKELGSQIL |
| | KEHPVENTQLQNEKLYLYYLQNGRDMYVDQELDINRLSDYDVDAIV |
| | PQSFLKDDSIDNKVLTRSDKNRGKSDNVPSEEVVKKMKNYWRQLLN |
| | AKLITQRKFDNLTKAERGGLSELDKAGFIKRQLVETRQITKHVAQIL |
| | DSRMNTKYDENDKLIREVKVITLKSKLVSDFRKDFQFYKVREINNYH |
| | HAHDAYLNAVVGTALIKKYPKLESEFVYGDYKVYDVRKMIAKSEQE |
| | IGKATAKYFFYSNIMNFFKTEITLANGEIRKRPLIETNGETGEIVWDK |
| | GRDFATVRKVLSMPQVNIVKKTEVQTGGFSKESILPKRNSDKLIARK |
| | KDWDPKKYGGFDSPTVAYSVLVVAKVEKGKSKKLKSVKELLGITIM |
| | ERSSFEKNPIDFLEAKGYKEVKKDLIIKLPKYSLFELENGRKRMLAS |
| | AGELQKGNELALPSKYVNFLYLASHYEKLKGSPEDNEQKQLFVEQH |
| | KHYLDEIIEQISEFSKRVILADANLDKVLSAYNKHRDKPIREQAENIIH |
| | LFTLTNLGAPAAFKYFDTTIDRKRYTSTKEVLDATLIHQSITGLYETR |
| | IDLSQLGGDSGGSKRTADGSEFEPKKKRKV (SEQ ID NO: 129) |
| | KEY: |
| | NUCLEAR LOCALIZATION SEQUENCE (NLS) TOP: (SEQ ID NO: 29), |
| | BOTTOM: (SEQ ID NO: 30) |
| | CAS9(H840A) (SEQ ID NO: 31) |
| | 33-AMINO ACID LINKER (SEQ ID NO: 11) |
| | M-MLV REVERSE TRANSCRIPTASE (SEQ ID NO: 32) |
| PRIME | MKRTADGSEFESPKKKRKVTLNIEDEYRLHETSKEPDVSLGSTWLSDFPQA |
| EDITOR | WAETGGMGLAVRQAPLIIPLKATSTPVSIKQYPMSQEARLGIKPHIQRLLDQG |
| MMLV_RT(WT)- | ILVPCQSPWNTPLLPVKKPGTNDYRPVQDLREVNKRVEDIHPTVPNPYNLLS |
| 60AA- | GLPPSHQWYTVLDLKDAFFCLRLHPTSQPLFAFEWRDPEMGISGQLTWTRL |
| CAS9(H840A) | PQGFKNSPTLFDEALHRDLADFRIQHPDLILLQYVDDLLLAATSELDCQQGT |
| | RALLQTLGNLGYRASAKKAQICQKQVKYLGYLLKEGQRWLTEARKETVMGQ |
| | PTPKTPRQLREFLGTAGFCRLWIPGFAEMAAPLYPLTKTGTLFNWGPDQQK |
| | AYQEIKQALLTAPALGLPDLTKPFELFVDEKQGYAKGVLTQKLGPWRRPVAY |
| | LSKKLDPVAAGWPPCLRMVAAIAVLTKDAGKLTMGQPLVILAPHAVEALVKQ |
| | PPDRWLSNARMTHYQALLLDTDRVQFGPVVALNPATLLPLPEEGLQHNCLDI |
| | LAEAHGTRPDLTDQPLPDADHTWYTDGSSLLQEGQRKAGAAVTTETEVIWA |
| | KALPAGTSAQRAELIALTQALKMAEGKKLNVYTDSRYAFATAHIHGEIYRRRGL |
| | LTSEGKEIKNKDEILALLKALFLPKRLSIIHCPGHQKGHSAEARGNRMADQA |
| | ARKAAITETPDTSTLLIENSSPSGGSSGGSSGSETPGTSESATPESAGSYPY |
| | DVPDYAGSAAPAAKKKKLDGSGSGGSSGGSDKKYSIGLDIGTNSVG |
| | WAVITDEYKVPSKKFKVLGNTDRHSIKKNLIGALLFDSGETAEATRL |
| | KRTARRRYTRRKNRICYLQEIFSNEMAKVDDSFFHRLEESFLVEEDK |
| | KHERHPIFGNIVDEVAYHEKYPTIYHLRKKLVDSTDKADLRLIYLAL |
| | AHMIKFRGHFLIEGDLNPDNSDVDKLFIQLVQTYNQLFEENPINASG |
| | VDAKAILSARLSKSRRLENLIAQLPGEKKNGLFGNLIALSLGLTPNFK |
| | SNFDLAEDAKLQLSKDTYDDDLDNLLAQIGDQYADLFLAAKNLSDAI |
| | LLSDILRVNTEITKAPLSASMIKRYDEHHQDLTLLKALVRQQLPEKY |
| | KEIFFDQSKNGYAGYIDGGASQEEFYKFIKPILEKMDGTEELLVKLN |
| | REDLLRKQRTFDNGSIPHQIHLGELHAILRRQEDFYPFLKDNREKIE |
| | KILTFRIPYYVGPLARGNSRFAWMTRKSEETITPWNFEEVVDKGASA |
| | QSFIERMTNFDKNLPNEKVLPKHSLLYEYFTVYNELTKVKYVTEGM |
| | RKPAFLSGEQKKAIVDLLFKTNRKVTVKQLKEDYFKKIECFDSVEIS |
| | GVEDRFNASLGTYHDLLKIIKDKDFLDNEENEDILEDIVLTLTLFEDR |
| | EMIEERLKTYAHLFDDKVMKQLKRRRYTGWGRLSRKLINGIRDKQ |
| | SGKTILDFLKSDGFANRNFMQLIHDDSLTFKEDIQKAQVSGQGDSLH |
| | EHIANLAGSPAIKKGILQTVKVVDELVKVMGRHKPENIVIEMAREN |
| | QTTQKGQKNSRERMKRIEEGIKELGSQILKEHPVENTQLQNEKLYL |
| | YYLQNGRDMYVDQELDINRLSDYDVDAIVPQSFLKDDSIDNKVLTRS |
| | DKNRGKSDNVPSEEVVKKMKNYWRQLLNAKLITQRKFDNLTKAER |
| | GGLSELDKAGFIKRQLVETRQITKHVAQILDSRMNTKYDENDKLIRE |
| | VKVITLKSKLVSDFRKDFQFYKVREINNYHHAHDAYLNAVVGTALIK |
| | KYPKLESEFVYGDYKVYDVRKMIAKSEQEIGKATAKYFFYSNIMNFF |
| | KTEITLANGEIRKRPLIETNGETGEIVWDKGRDFATVRKVLSMPQVN |
| | IVKKTEVQTGGFSKESILPKRNSDKLIARKKDWDPKKYGGFDSPTVA |
| | YSVLVVAKVEKGKSKKLKSVKELLGITIMERSSFEKNPIDFLEAKGY |
| | KEVKKDLIIKLPKYSLFELENGRKRMLASAGELQKGNELALPSKYV |
| | NFLYLASHYEKLKGSPEDNEQKQLFVEQHKHYLDEIIEQISEFSKRVI |
| | LADANLDKVLSAYNKHRDKPIREQAENIIHLFTLTNLGAPAAFKYFD |
| | TTIDRKRYTSTKEVLDATLIHQSITGLYETRIDLSQLGGDSGGSKRTA |
| | DGSEFEPKKKRKV (SEQ ID NO: 130) |
| | KEY: |
| | NUCLEAR LOCALIZATION SEQUENCE (NLS) TOP: (SEQ ID NO: 29), |
| | BOTTOM: (SEQ ID NO: 30) |
| | CAS9(H840A)(SEQ ID NO: 31) |
| | AMINO ACID LINKER (SEQ ID NO: 131) |
| | M-MLV REVERSE TRANSCRIPTASE (SEQ ID NO: 132) |
| PRIME | MKRTADGSEFESPKKKRKVDKKYSIGLDIGTNSVGWAVITDEYKVPSK |
| EDITOR | KFKVLGNTDRHSIKKNLIGALLFDSGETAEATRLKRTARRRYTRRK |
| CAS9(H840A)- | NRICYLQEIFSNEMAKVDDSFFHRLEESFLVEEDKKHERHPIFGNIVD |
| FEN1- | EVAYHEKYPTIYHLRKKLVDSTDKADLRLIYLALAHMIKFRGHFLIE |
| MMLV_RT | GDLNPDNSDVDKLFIQLVQTYNQLFEENPINASGVDAKAILSARLSKS |
| D200N | RRLENLIAQLPGEKKNGLFGNLIALSLGLTPNFKSNFDLAEDAKLQL |
| T330P | SKDTYDDDLDNLLAQIGDQYADLFLAAKNLSDAILLSDILRVNTEITK |
| L603W | APLSASMIKRYDEHHQDLTLLKALVRQQLPEKYKEIFFDQSKNGYA |
| T306K | GYIDGGASQEEFYKFIKPILEKMDGTEELLVKLNREDLLRKQRTFDN |
| W313F | GSIPHQIHLGELHAILRRQEDFYPFLKDNREKIEKILTFRIPYYVGPL |
| | ARGNSRFAWMTRKSEETITPWNFEEVVDKGASAQSFIERMTNFDKN |
| | LPNEKVLPKHSLLYEYFTVYNELTKVKYVTEGMRKPAFLSGEQKKA |
| | IVDLLFKTNRKVTVKQLKEDYFKKIECFDSVEISGVEDRFNASLGTY |
| | HDLLKIIKDKDFLDNEENEDILEDIVLTLTLFEDREMIEERLKTYAHL |
| | FDDKVMKQLKRRRYTGWGRLSRKLINGIRDKQSGKTILDFLKSDGF |
| | ANRNFMQLIHDDSLTFKEDIQKAQVSGQGDSLHEHIANLAGSPAIKK |
| | GILQTVKVVDELVKVMGRHKPENIVIEMARENQTTQKGQKNSRER |
| | MKRIEEGIKELGSQILKEHPVENTQLQNEKLYLYYLQNGRDMYVDQ |
| | ELDINRLSDYDVDAIVPQSFLKDDSIDNKVLTRSDKNRGKSDNVPSEE |
| | VVKKMKNYWRQLLNAKLITQRKFDNLTKAERGGLSELDKAGFIKR |
| | QLVETRQITKHVAQILDSRMNTKYDENDKLIREVKVITLKSKLVSDF |
| | RKDFQFYKVREINNYHHAHDAYLNAVVGTALIKKYPKLESEFVYGD |
| | YKVYDVRKMIAKSEQEIGKATAKYFFYSNIMNFFKTEITLANGEIRK |
| | RPLIETNGETGEIVWDKGRDFATVRKVLSMPQVNIVKKTEVQTGGF |
| | SKESILPKRNSDKLIARKKDWDPKKYGGFDSPTVAYSVLVVAKVEKG |
| | KSKKLKSVKELLGITIMERSSFEKNPIDFLEAKGYKEVKKDLIIKLPK |
| | YSLFELENGRKRMLASAGELQKGNELALPSKYVNFLYLASHYEKLK |
| | GSPEDNEQKQLFVEQHKHYLDEIIEQISEFSKRVILADANLDKVLSAY |
| | NKHRDKPIREQAENIIHLFTLTNLGAPAAFKYFDTTIDRKRYTSTKEV |
| | LDATLIHQSITGLYETRIDLSQLGGDSGGSSGGSSGSETPGTSESATPE |
| | SSGGSSGGSSGIQGLAKLIADVAPSAIRENDIKSYFGRKVAIDASMSIYQF |
| | LIAVRQGGDVLQNEEGETTSHLMGMFYRTIRMMENGIKPVYVFDGKPP |
| | QLKSGELAKRSERRAEAEKQLQQAQAAGAEQEVEKFTKRLVKVTKQH |
| | NDECKHLLSLMGIPYLDAPSEAEASCAALVKAGKVYAAATEDMDCLTF |
| | GSPVLMRHLTASEAKKLPIQEFHLSRILQELGLNQEQFVDLCILLGSDYC |
| | ESIRGIGPKRAVDLIQKHKSIEEIVRRLDPNKYPVPENWLHKEAHQLFLEP |
| | EVLDPESVELKWSEPNEEELIKFMCGEKQFSEERIRSGVKRLSKSRQGST |
| | QGRLDDFFKVTGSLSSAKRKEPEPKGSTKKKAKTGAAGKFKRGKSGGS |
| | SGGSSGSETPGTSESATPESSGGSSGGSSTLNIEDEYRLHETSKEPDVSLG |
| | STWLSDFPQAWAETGGMGLAVRQAPLIIPLKATSTPVSIKQYPMSQEARLGIK |
| | PHIQRLLDQGILVPCQSPWNTPLLPVKKPGTNDYRPVQDLREVNKRVEDIHP |
| | TVPNPYNLLSGLPPSHQWYTVLDLKDAFFCLRLHPTSQPLFAFEWRDPEMGI |
| | SGQLTWTRLPQGFKNSPTLFNEALHRDLADFRIQHPDLILLQYVDDLLLAAT |
| | SELDCQQGTRALLQTLGNLGYRASAKKAQICQKQVKYLGYLLKEGQRWLTE |
| | ARKETVMGQPTPKTPRQLREFLGKAGFCRLFIPGFAEMAAPLYPLTKPGTLF |
| | NWGPDQQKAYQEIKQALLTAPALGLPDLTKPFELFVDEKQGYAKGVLTQKL |
| | GPWRRPVAYLSKKLDPVAAGWPPCLRMVAAIAVLTKDAGKLTMGQPLVILAP |
| | HAVEALVKQPPDRWLSNARMTHYQALLLDTDRVQFGPVVALNPATLLPLPEE |
| | GLQHNCLDILAEAHGTRPDLTDQPLPDADHTWYTDGSSLLQEGQRKAGAA |
| | VTTETEVIWAKALPAGTSAQRAELIALTQALKMAEGKKLNVYTDSRYAFATAHI |
| | HGEIYRRRGWLTSEGKEIKNKDEILALLKALFLPKRLSIIHCPGHQKGHSAEA |
| | RGNRMADQAARKAAITETPDTSTLLIENSSPSGGSKRTADGSEFEPKKKRKV |
| | (SEQ ID NO: 133) |
| | KEY: |
| | NUCLEAR LOCALIZATION SEQUENCE (NLS) TOP: (SEQ ID NO: 29), |
| | BOTTOM: (SEQ ID NO: 30) |
| | CAS9(H840A)(SEQ ID NO: 31) |
| | 33-AMINO ACID LINKER 1 (SEQ ID NO: 11) |
| | M-MLV REVERSE TRANSCRIPTASE (SEQ ID NO: 34) |
| | 33-AMINO ACID LINKER 2 (SEQ ID NO: 11) |
| | FEN1 (SEQ ID NO: 134) |

[0612] In other embodiments, the prime editor can be based on SaCas9 or on SpCas9 nickases with altered PAM specificities, such as the following exemplary sequences:

| | | |
|---|---|---|
| SACAS9-M- | MKRTADGSEFESPKKKRKVGKRNYILGLDIGITSVGYGIIDY | SEQ ID NO: |
| MLV RT | ETRDVIDAGVRLFKEANVENNEGRRSKRGARRLKRRRRHR | 135 |
| PRIME | IQRVKKLLFDYNLLTDHSELSGINPYEARVKGLSQKLSEEEF | |
| EDITOR | SAALLHLAKRRGVHNVNEVEEDTGNELSTKEQISRNSKAL | |
| | EEKYVAELQLERLKKDGEVRGSINRFKTSDYVKEAKQLLK | |
| | VQKAYHQLDQSFIDTYIDLLETRRTYYEGPGEGSPFGWKDI | |
| | KEWYEMLMGHCTYFPEELRSVKYAYNADLYNALNDLNNL | |
| | VITRDENEKLEYYEKFQUIENVFKQKKKPTLKQIAKEILVNE | |
| | EDIKGYRVTSTGKPEFTNLKVYHDIKDITARKEIIENAELLD | |
| | QIAKILTIYQSSEDIQEELTNLNSELTQEEIEQISNLKGYTGTH | |
| | NLSLKAINLILDELWHTNDNQIAIFNRLKLVPKKVDLSQQKE | |
| | IPTTLVDDFILSPVVKRSFIQSIKVINAIIKKYGLPNDIIIELARE | |
| | KNSKDAQKMINEMQKRNRQTNERIEEIIRTTGKENAKYLIE | |
| | KIKLHDMQEGKCLYSLEAIPLEDLLNNPFNYEVDHIIPRSVS | |
| | FDNSFNNKVLVKQEEASKKGNRTPFQYLSSSDSKISYETFK | |
| | KHILNLAKGKGRISKTKKEYLLEERDINRFSVQKDFINRNLV | |
| | DTRYATRGLMNLLRSYFRVNNLDVKVKSINGGFTSFLRRK | |
| | WKFKKERNKGYKHHAEDALIIANADFIFKEWKKLDKAKK | |
| | VMENQMFEEKQAESMPEIETEQEYKEIFITPHQIKHIKDFKD | |
| | YKYSHRVDKKPNRELINDTLYSTRKDDKGNTLIVNNLNGLY | |
| | DKDNDKLKKLINKSPEKLLMYHHDPQTYQKLKLIMEQYG | |
| | DEKNPLYKYYEETGNYLTKYSKKDNGPVIKKIKYYGNKLN | |
| | AHLDITDDYPNSRNKVVKLSLKPYRFDVYLDNGVYKFVTV | |
| | KNLDVIKKENYYEVNSKCYEEAKKLKKISNQAEFIASFYNN | |
| | DLIKINGELYRVIGVNNDLLNRIEVNMIDITYREYLENMNDK | |
| | RPPRIIKTIASKTQSIKKYSTDILGNLYEVKSKKHPQIIKKGSG | |
| | GSSGGSSGSETPGTSESATPESSGGSSGGSSTLNIEDEYRLHE | |
| | TSKEPDVSLGSTWLSDFPQAWAETGGMGLAVRQAPLIIPLK | |
| | ATSTPVSIKQYPMSQEARLGIKPHIQRLLDQGILVPCQSPWN | |
| | TPLLPVKKPGTNDYRPVQDLREVNKRVEDIHPTVPNPYNLL | |
| | SGLPPSHQWYTVLDLKDAFFCLRLHPTSQPLFAFEWRDPEM | |
| | GISGQLTWTRLPQGFKNSPTLFDEALHRDLADFRIQHPDLIL | |
| | LQYVDDLLLAATSELDCQQGTRALLQTLGNLGYRASAKKA | |
| | QICQKQVKYLGYLLKEGQRWLTEARKETVMGQPTPKTPRQ | |
| | LREFLGTAGFCRLWIPGFAEMAAPLYPLTKTGTLFNWGPDQ | |
| | QKAYQEIKQALLTAPALGLPDLTKPFELFVDEKQGYAKGVL | |
| | TQKLGPWRRPVAYLSKKLDPVAAGWPPCLRMVAAIAVLTK | |
| | DAGKLTMGQPLVILAPHAVEALVKQPPDRWLSNARMTHYQ | |
| | ALLLDTDRVQFGPVVALNPATLLPLPEEGLQHNCLDILAEAH | |
| | GTRPDLTDQPLPDADHTWYTDGSSLLQEGQRKAGAAVTTE | |
| | TEVIWAKALPAGTSAQRAELIALTQALKMAEGKKLNVYTD | |
| | SRYAFATAHIHGEIYRRRGLLTSEGKEIKNKDEILALLKALFL | |
| | PKRLSIIHCPGHQKGHSAEARGNRMADQAARKAAITETPDT | |
| | STLLIENSSPSGGSKRTADGSEFEPKKKRKV | |
| SPCAS9(H840A)- | MKRTADGSEFESPKKKRKVDKKYSIGLDIGTNSVGWAVITD | SEQ ID NO: |
| VRQR- | EYKVPSKKFKVLGNTDRHSIKKNLIGALLFDSGETAEATRL | 136 |
| MALONEY | KRTARRRYTRRKNRICYLQEIFSNEMAKVDDSFFHRLEESFL | |
| MURINE | VEEDKKHERHPIFGNIVDEVAYHEKYPTIYHLRKKLVDSTD | |
| LEUKEMIA | KADLRLIYLALAHMIKFRGHFLIEGDLNPDNSDVDKLFIQLV | |
| VIRUS | QTYNQLFEENPINASGVDAKAILSARLSKSRRLENLIAQLPG | |
| REVERSE | EKKNGLFGNLIALSLGLTPNFKSNFDLAEDAKLQLSKDTYD | |
| TRANSCRIPTASE | DDLDNLLAQIGDQYADLFLAAKNLSDAILLSDILRVNTEITK | |
| PRIME | APLSASMIKRYDEHHQDLTLLKALVRQQLPEKYKEIFFDQS | |
| EDITOR | KNGYAGYIDGGASQEEFYKFIKPILEKMDGTEELLVKLNRE | |
| | DLLRKQRTFDNGSIPHQIHLGELHAILRRQEDFYPFLKDNRE | |
| | KIEKILTFRIPYYVGPLARGNSRFAWMTRKSEETITPWNFEE | |
| | VVDKGASAQSFIERMTNFDKNLPNEKVLPKHSLLYEYFTVY | |
| | NELTKVKYVTEGMRKPAFLSGEQKKAIVDLLFKTNRKVTV | |
| | KQLKEDYFKKIECFDSVEISGVEDRFNASLGTYHDLLKIIKD | |
| | KDFLDNEENEDILEDIVLTLTLFEDREMIEERLKTYAHLFDD | |
| | KVMKQLKRRRYTGWGRLSRKLINGIRDKQSGKTILDFLKS | |
| | DGFANRNFMQLIHDDSLTFKEDIQKAQVSGQGDSLHEHIAN | |
| | LAGSPAIKKGILQTVKVVDELVKVMGRHKPENIVIEMAREN | |
| | QTTQKGQKNSRERMKRIEEGIKELGSQILKEHPVENTQLQN | |
| | EKLYLYYLQNGRDMYVDQELDINRLSDYDVDAIVPQSFLK | |
| | DDSIDNKVLTRSDKNRGKSDNVPSEEVVKKMKNYWRQLL | |
| | NAKLITQRKFDNLTKAERGGLSELDKAGFIKRQLVETRQITK | |
| | HVAQILDSRMNTKYDENDKLIREVKVITLKSKLVSDFRKDF | |
| | QFYKVREINNYHHAHDAYLNAVVGTALIKKYPKLESEFVY | |
| | GDYKVYDVRKMIAKSEQEIGKATAKYFFYSNIMNFFKTEIT | |
| | LANGEIRKRPLIETNGETGEIVWDKGRDFATVRKVLSMPQV | |
| | NIVKKTEVQTGGFSKESILPKRNSDKLIARKKDWDPKKYGG | |
| | FVSPTVAYSVLVVAKVEKGKSKKLKSVKELLGITIMERSSFE | |
| | KNPIDFLEAKGYKEVKKDLIIKLPKYSLFELENGRKRMLAS | |
| | ARELQKGNELALPSKYVNFLYLASHYEKLKGSPEDNEQKQ | |
| | LFVEQHKHYLDEIIEQISEFSKRVILADANLDKVLSAYNKHR | |
| | DKPIREQAENIIHLFTLTNLGAPAAFKYFDTTIDRKQYRSTKE | |
| | VLDATLIHQSITGLYETRIDLSQLGGDSGGSSGGSSGSETPGT | |
| | SESATPESSGGSSGGSSTLNIEDEYRLHETSKEPDVSLGSTW | |
| | LSDFPQAWAETGGMGLAVRQAPLIIPLKATSTPVSIKQYPMS | |
| | QEARLGIKPHIQRLLDQGILVPCQSPWNTPLLPVKKPGTND | |
| | YRPVQDLREVNKRVEDIHPTVPNPYNLLSGLPPSHQWYTVL | |
| | DLKDAFFCLRLHPTSQPLFAFEWRDPEMGISGQLTWTRLPQ | |
| | GFKNSPTLFNEALHRDLADFRIQHPDLILLQYVDDLLLAATS | |
| | ELDCQQGTRALLQTLGNLGYRASAKKAQICQKQVKYLGY | |
| | LLKEGQRWLTEARKETVMGQPTPKTPRQLREFLGKAGFCR | |
| | LFIPGFAEMAAPLYPLTKPGTLFNWGPDQQKAYQEIKQALL | |
| | TAPALGLPDLTKPFELFVDEKQGYAKGVLTQKLGPWRRPVA | |
| | YLSKKLDPVAAGWPPCLRMVAAIAVLTKDAGKLTMGQPLVI | |
| | LAPHAVEALVKQPPDRWLSNARMTHYQALLLDTDRVQFGP | |
| | VVALNPATLLPLPEEGLQHNCLDILAEAHGTRPDLTDQPLPD | |
| | ADHTWYTDGSSLLQEGQRKAGAAVTTETEVIWAKALPAGT | |
| | SAQRAELIALTQALKMAEGKKLNVYTDSRYAFATAHIHGEI | |
| | YRRRGWLTSEGKEIKNKDEILALLKALFLPKRLSIIHCPGHQ | |
| | KGHSAEARGNRMADQAARKAAITETPDTSTLLIENSSPSGG | |
| | SKRTADGSEFEPKKKRKV | |
| SPCAS9(H840A)- | MKRTADGSEFESPKKKRKVDKKYSIGLDIGTNSVGWAVITD | |
| VRER- | EYKVPSKKFKVLGNTDRHSIKKNLIGALLFDSGETAEATRL | |
| MALONEY | KRTARRRYTRRKNRICYLQEIFSNEMAKVDDSFFHRLEESFL | |
| MURINE | VEEDKKHERHPIFGNIVDEVAYHEKYPTIYHLRKKLVDSTD | |
| LEUKEMIA | KADLRLIYLALAHMIKFRGHFLIEGDLNPDNSDVDKLFIQLV | |
| VIRUS | QTYNQLFEENPINASGVDAKAILSARLSKSRRLENLIAQLPG | |
| REVERSE | EKKNGLFGNLIALSLGLTPNFKSNFDLAEDAKLQLSKDTYD | |
| TRANSCRIPTASE | DDLDNLLAQIGDQYADLFLAAKNLSDAILLSDILRVNTEITK | |
| PRIME | APLSASMIKRYDEHHQDLTLLKALVRQQLPEKYKEIFFDQS | |
| EDITOR | KNGYAGYIDGGASQEEFYKFIKPILEKMDGTEELLVKLNRE | |
| SEQ ID NO: | DLLRKQRTFDNGSIPHQIHLGELHAILRRQEDFYPFLKDNRE | |
| 137 | KIEKILTFRIPYYVGPLARGNSRFAWMTRKSEETITPWNFEE | |
| | VVDKGASAQSFIERMTNFDKNLPNEKVLPKHSLLYEYFTVY | |
| | NELTKVKYVTEGMRKPAFLSGEQKKAIVDLLFKTNRKVTV | |
| | KQLKEDYFKKIECFDSVEISGVEDRFNASLGTYHDLLKIIKD | |
| | KDFLDNEENEDILEDIVLTLTLFEDREMIEERLKTYAHLFDD | |
| | KVMKQLKRRRYTGWGRLSRKLINGIRDKQSGKTILDFLKS | |
| | DGFANRNFMQLIHDDSLTFKEDIQKAQVSGQGDSLHEHIAN | |
| | LAGSPAIKKGILQTVKVVDELVKVMGRHKPENIVIEMAREN | |
| | QTTQKGQKNSRERMKRIEEGIKELGSQILKEHPVENTQLQN | |
| | EKLYLYYLQNGRDMYVDQELDINRLSDYDVDAIVPQSFLK | |
| | DDSIDNKVLTRSDKNRGKSDNVPSEEVVKKMKNYWRQLL | |
| | NAKLITQRKFDNLTKAERGGLSELDKAGFIKRQLVETRQITK | |
| | HVAQILDSRMNTKYDENDKLIREVKVITLKSKLVSDFRKDF | |
| | QFYKVREINNYHHAHDAYLNAVVGTALIKKYPKLESEFVY | |
| | GDYKVYDVRKMIAKSEQEIGKATAKYFFYSNIMNFFKTEIT | |
| | LANGEIRKRPLIETNGETGEIVWDKGRDFATVRKVLSMPQV | |
| | NIVKKTEVQTGGFSKESILPKRNSDKLIARKKDWDPKKYGG | |
| | FVSPTVAYSVLVVAKVEKGKSKKLKSVKELLGITIMERSSFE | |
| | KNPIDFLEAKGYKEVKKDLIIKLPKYSLFELENGRKRMLAS | |
| | ARELQKGNELALPSKYVNFLYLASHYEKLKGSPEDNEQKQ | |
| | LFVEQHKHYLDEIIEQISEFSKRVILADANLDKVLSAYNKHR | |
| | DKPIREQAENIIHLFTLTNLGAPAAFKYFDTTIDRKEYRSTKE | |
| | VLDATLIHQSITGLYETRIDLSQLGGDSGGSSGGSSGSETPGT | |
| | SESATPESSGGSSGGSSTLNIEDEYRLHETSKEPDVSLGSTW | |
| | LSDFPQAWAETGGMGLAVRQAPLIIPLKATSTPVSIKQYPMS | |
| | QEARLGIKPHIQRLLDQGILVPCQSPWNTPLLPVKKPGTND | |
| | YRPVQDLREVNKRVEDIHPTVPNPYNLLSGLPPSHQWYTVL | |
| | DLKDAFFCLRLHPTSQPLFAFEWRDPEMGISGQLTWTRLPQ | |
| | GFKNSPTLFNEALHRDLADFRIQHPDLILLQYVDDLLLAATS | |
| | ELDCQQGTRALLQTLGNLGYRASAKKAQICQKQVKYLGY | |
| | LLKEGQRWLTEARKETVMGQPTPKTPRQLREFLGKAGFCR | |
| | LFIPGFAEMAAPLYPLTKPGTLFNWGPDQQKAYQEIKQALL | |
| | TAPALGLPDLTKPFELFVDEKQGYAKGVLTQKLGPWRRPVA | |
| | YLSKKLDPVAAGWPPCLRMVAAIAVLTKDAGKLTMGQPLVI | |
| | LAPHAVEALVKQPPDRWLSNARMTHYQALLLDTDRVQFGP | |
| | VVALNPATLLPLPEEGLQHNCLDILAEAHGTRPDLTDQPLPD | |
| | ADHTWYTDGSSLLQEGQRKAGAAVTTETEVIWAKALPAGT | |
| | SAQRAELIALTQALKMAEGKKLNVYTDSRYAFATAHIHGEI | |
| | YRRRGWLTSEGKEIKNKDEILALLKALFLPKRLSIIHCPGHQ | |
| | KGHSAEARGNRMADQAARKAAITETPDTSTLLIENSSPSGG | |
| | SKRTADGSEFEPKKKRKV | |

[0613] In yet other embodiments, the prime editor contemplated herein may include a Cas9 nickase (e.g., Cas9 (H840A)) fused to a truncated version of M-MLV reverse transcriptase. In this embodiment, the reverse transcriptase also contains 4 mutations (D200N, T306K, W313F, T330P; noting that the L603W mutation present in PE2 is no longer present due to the truncation). The DNA sequence encoding this truncated editor is 522 bp smaller than PE2, and therefore makes its potentially useful for applications where delivery of the DNA sequence is challenging due to its size (i.e. adeno-associated virus and lentivirus delivery). This embodiment is referred to as Cas9(H840A)-MMLV-RT(trunc) or “PE2-short” or “PE2-trunc” and has the following amino acid sequence:

| | |
|---|---|
| CAS9(H840A)- | MKRTADGSEFESPKKKRKVDKKYSIGLDIGTNSVGWAVITDEY |
| MMLV- | KVPSKKFKVLGNTDRHSIKKNLIGALLFDSGETAEATRLKRTA |
| RT(TRUNC) OR | RRRYTRRKNRICYLQEIFSNEMAKVDDSFFHRLEESFLVEEDK |
| PE2-SHORT | KHERHPIFGNIVDEVAYHEKYPTIYHLRKKLVDSTDKADLRLI |
| | YLALAHMIKFRGHFLIEGDLNPDNSDVDKLFIQLVQTYNQLFE |
| | ENPINASGVDAKAILSARLSKSRRLENLIAQLPGEKKNGLFGN |
| | LIALSLGLTPNFKSNFDLAEDAKLQLSKDTYDDDLDNLLAQIG |
| | DQYADLFLAAKNLSDAILLSDILRVNTEITKAPLSASMIKRYDE |
| | HHQDLTLLKALVRQQLPEKYKEIFFDQSKNGYAGYIDGGASQ |
| | EEFYKFIKPILEKMDGTEELLVKLNREDLLRKQRTFDNGSIPH |
| | QIHLGELHAILRRQEDFYPFLKDNREKIEKILTFRIPYYVGPLA |
| | RGNSRFAWMTRKSEETITPWNFEEVVDKGASAQSFIERMTNF |
| | DKNLPNEKVLPKHSLLYEYFTVYNELTKVKYVTEGMRKPAFL |
| | SGEQKKAIVDLLFKTNRKVTVKQLKEDYFKKIECFDSVEISGV |
| | EDRFNASLGTYHDLLKIIKDKDFLDNEENEDILEDIVLTLTLFE |
| | DREMIEERLKTYAHLFDDKVMKQLKRRRYTGWGRLSRKLIN |
| | GIRDKQSGKTILDFLKSDGFANRNFMQLIHDDSLTFKEDIQKA |
| | QVSGQGDSLHEHIANLAGSPAIKKGILQTVKVVDELVKVMGR |
| | HKPENIVIEMARENQTTQKGQKNSRERMKRIEEGIKELGSQIL |
| | KEHPVENTQLQNEKLYLYYLQNGRDMYVDQELDINRLSDYD |
| | VDAIVPQSFLKDDSIDNKVLTRSDKNRGKSDNVPSEEVVKKM |
| | KNYWRQLLNAKLITQRKFDNLTKAERGGLSELDKAGFIKRQL |
| | VETRQITKHVAQILDSRMNTKYDENDKLIREVKVITLKSKLVS |
| | DFRKDFQFYKVREINNYHHAHDAYLNAVVGTALIKKYPKLES |
| | EFVYGDYKVYDVRKMIAKSEQEIGKATAKYFFYSNIMNFFKT |
| | EITLANGEIRKRPLIETNGETGEIVWDKGRDFATVRKVLSMPQ |
| | VNIVKKTEVQTGGFSKESILPKRNSDKLIARKKDWDPKKYGG |
| | FDSPTVAYSVLVVAKVEKGKSKKLKSVKELLGITIMERSSFEK |
| | NPIDFLEAKGYKEVKKDLIIKLPKYSLFELENGRKRMLASAGE |
| | LQKGNELALPSKYVNFLYLASHYEKLKGSPEDNEQKQLFVEQ |
| | HKHYLDEIIEQISEFSKRVILADANLDKVLSAYNKHRDKPIREQ |
| | AENIIHLFTLTNLGAPAAFKYFDTTIDRKRYTSTKEVLDATLIH |
| | QSITGLYETRIDLSQLGGDSGGSSGGSSGSETPGTSESATPESSG |
| | GSSGGSSTLNIEDEYRLHETSKEPDVSLGSTWLSDFPQAWAETGGMG |
| | LAVRQAPLIIPLKATSTPVSIKQYPMSQEARLGIKPHIQRLLDQGILVPC |
| | QSPWNTPLLPVKKPGTNDYRPVQDLREVNKRVEDIHPTVPNPYNLLS |
| | GLPPSHQWYTVLDLKDAFFCLRLHPTSQPLFAFEWRDPEMGISGQLT |
| | WTRLPQGFKNSPTLFNEALHRDLADFRIQHPDLILLQYVDDLLLAATS |
| | ELDCQQGTRALLQTLGNLGYRASAKKAQICQKQVKYLGYLLKEGOR |
| | WLTEARKETVMGQPTPKTPRQLREFLGKAGFCRLFIPGFAEMAAPLY |
| | PLTKPGTLFNWGPDQQKAYQEIKQALLTAPALGLPDLTKPFELFVDE |
| | KQGYAKGVLTQKLGPWRRPVAYLSKKLDPVAAGWPPCLRMVAAIAVL |
| | TKDAGKLTMGQPLVILAPHAVEALVKOPPDRWLSNARMTHYQALLL |
| | DTDRVQFGPVVALNPATLLPLPEEGLQHNCLDNSRLINSGGSKRTAD |
| | GSEFEPKKKRKV (SEQ ID NO: 35) |
| | KEY: |
| | NUCLEAR LOCALIZATION SEQUENCE (NLS) |
| | TOP:(SEQ ID NO: 29), |
| | BOTTOM: (SEQ ID NO: 30) |
| | CAS9(H840A) (SEQ ID NO: 31) |
| | 33-AMINO ACID LINKER 1 (SEQ ID NO: 11) |
| | M-MLV TRUNCATED REVERSE TRANSCRIPTASE (SEQ ID NO: 36) |

[0614] See FIG. 75, which provides a bar graph comparing the efficiency (i.e., “% of total sequencing reads with the specified edits or indels”) of PE2, PE2-trunc, PE3, and PE3-trunc over different target sites in various cell lines. The data shows that the prime editors comprising the truncated RT variants were about as efficient as the prime editors comprising the non-truncated RT proteins.

[0615] In various embodiments, the prime editor contemplated herein may also include any variants of the above-disclosed sequences having an amino acid sequence that is at least about 70% identical, at least about 80% identical, at least about 90% identical, at least about 95% identical, at least about 96% identical, at least about 97% identical, at least about 98% identical, at least about 99% identical, at least about 99.5% identical, or at least about 99.9% identical to PE1, PE2, or any of the above indicated prime editor fusion sequences.

[0616] In certain embodiments, linkers may be used to link any of the peptides or peptide domains or moieties of the invention (e.g., a napDNAbp linked or fused to a polymerase, such as a reverse transcriptase).

### [5] Linkers and Other Domains

[0617] The Prime editors may comprise various other domains besides the napDNAbp (e.g., Cas9 domain) and the polymerase domain (e.g., RT domain). For example, in the case where the napDNAbp is a Cas9 and the polymerase is a RT, the Prime editors may comprise one or more linkers that join the Cas9 domain with the RT domain. The linkers may also join other functional domains, such as nuclear localization sequences (NLS) or a FEN1 (or other flap endonuclease) to the Prime editors or a domain thereof.

[0618] In addition, in embodiments involving trans prime editing, linkers may be used to link tPERT recruitment protein to a prime editor, e.g., between the tPERt recruitment protein and the napDNAbp. See e.g., FIG. 3G for an exemplary schematic of a trans prime editor (tPE) that includes linkers to separately fuse a polymerase domain and a recruiting protein domain to a napDNAbp.

### A. Linkers

[0619] As defined above, the term “linker,” as used herein, refers to a chemical group or a molecule linking two molecules or moieties, e.g., a binding domain and a cleavage domain of a nuclease. In some embodiments, a linker joins a gRNA binding domain of an RNA-programmable nuclease and the catalytic domain of a polymerase (e.g., a reverse transcriptase). In some embodiments, a linker joins a dCas9 and reverse transcriptase. Typically, the linker is positioned between, or flanked by, two groups, molecules, or other moieties and connected to each one via a covalent bond, thus connecting the two. In some embodiments, the linker is an amino acid or a plurality of amino acids (e.g., a peptide or protein). In some embodiments, the linker is an organic molecule, group, polymer, or chemical moiety. In some embodiments, the linker is 5-100 amino acids in length, for example, 5, 6, 7, 8, 9, 10, 11, 12, 13, 14, 15, 16, 17, 18, 19, 20, 21, 22, 23, 24, 25, 26, 27, 28, 29, 30, 30-35, 35-40, 40-45, 45-50, 50-60, 60-70, 70-80, 80-90, 90-100, 100-150, or 150-200 amino acids in length. Longer or shorter linkers are also contemplated.

[0620] In certain embodiments, the linkers are nucleotide linkers and can refer to those linkers that join a pegRNA to an additional nucleotide moiety, as described herein, such as, but not limited to, an aptamer (e.g., prequeosin₁-1 riboswitch aptamer or “evopreQ₁-1”) or a variant thereof, a pseudoknot (the MMLV viral genome pseudoknot or “Mpknot-1”) or a variant thereof, a tRNA (e.g., the modified tRNA used by MMLV as a primer for reverse transcription) or a variant thereof, or a G-quadruplex or a variant thereof. Exemplary nucleotide sequences of such linkers are provided throughout herein, and include, but are not limited to SEQ ID NOs: 225-236.

[0621] The linker may be as simple as a covalent bond, or it may be a polymeric linker many atoms in length. In certain embodiments, the linker is a polypeptide or based on amino acids. In other embodiments, the linker is not peptide-like. In certain embodiments, the linker is a covalent bond (e.g., a carbon-carbon bond, disulfide bond, carbon-heteroatom bond, etc.). In certain embodiments, the linker is a carbon-nitrogen bond of an amide linkage. In certain embodiments, the linker is a cyclic or acyclic, substituted or unsubstituted, branched or unbranched aliphatic or heteroaliphatic linker. In certain embodiments, the linker is polymeric (e.g., polyethylene, polyethylene glycol, polyamide, polyester, etc.). In certain embodiments, the linker comprises a monomer, dimer, or polymer of aminoalkanoic acid. In certain embodiments, the linker comprises an aminoalkanoic acid (e.g., glycine, ethanoic acid, alanine, beta-alanine, 3-aminopropanoic acid, 4-aminobutanoic acid, 5-pentanoic acid, etc.). In certain embodiments, the linker comprises a monomer, dimer, or polymer of aminohexanoic acid (Ahx). In certain embodiments, the linker is based on a carbocyclic moiety (e.g., cyclopentane, cyclohexane). In other embodiments, the linker comprises a polyethylene glycol moiety (PEG). In other embodiments, the linker comprises amino acids. In certain embodiments, the linker comprises a peptide. In certain embodiments, the linker comprises an aryl or heteroaryl moiety. In certain embodiments, the linker is based on a phenyl ring. The linker may included functionalized moieties to facilitate attachment of a nucleophile (e.g., thiol, amino) from the peptide to the linker. Any electrophile may be used as part of the linker. Exemplary electrophiles include, but are not limited to, activated esters, activated amides, Michael acceptors, alkyl halides, aryl halides, acyl halides, and isothiocyanates.

[0622] In some other embodiments, the linker comprises the amino acid sequence (GGGGS)ₙ (SEQ ID NO: 138), (G)ₙ(SEQ ID NO: 139), (EAAAK)ₙ (SEQ ID NO: 12), (GGS)ₙ (SEQ ID NO: 140), (SGGS)ₙ(SEQ ID NO: 8), (XP)ₙ (SEQ ID NO: 141), or any combination thereof, wherein n is independently an integer between 1 and 30, and wherein X is any amino acid. In some embodiments, the linker comprises the amino acid sequence (GGS)N(SEQ ID NO: 140), wherein n is 1, 3, or 7. In some embodiments, the linker comprises the amino acid sequence SGSETPGTSESATPES (SEQ ID NO: 142). In some embodiments, the linker comprises the amino acid sequence SGGSSGGSSGSETPGTSESATPESSGGSSGGS (SEQ ID NO: 143). In some embodiments, the linker comprises the amino acid sequence SGGSGGSGGS (SEQ ID NO: 144). In some embodiments, the linker comprises the amino acid sequence SGGS (SEQ ID NO: 8). In other embodiments, the linker comprises the amino acid sequence

(SEQ ID NO: 131)
SGGSSGGSSGSETPGTSESATPESAGSYPYDVPDYAGSAAPAAKKKK
LDGSGSGGSSGGS.

[0623] In certain embodiments, linkers may be used to link any of the peptides or peptide domains or moieties of the invention (e.g., a napDNAbp linked or fused to a polymerase, such as a reverse transcriptase).

[0624] As defined above, the term “linker,” as used herein, refers to a chemical group or a molecule linking two molecules or moieties, e.g., a binding domain and a cleavage domain of a nuclease. In some embodiments, a linker joins a gRNA binding domain of an RNA-programmable nuclease and the catalytic domain of a recombinase. In some embodiments, a linker joins a dCas9 and reverse transcriptase. Typically, the linker is positioned between, or flanked by, two groups, molecules, or other moieties and connected to each one via a covalent bond, thus connecting the two. In some embodiments, the linker is an amino acid or a plurality of amino acids (e.g., a peptide or protein). In some embodiments, the linker is an organic molecule, group, polymer, or chemical moiety. In some embodiments, the linker is 5-100 amino acids in length, for example, 5, 6, 7, 8, 9, 10, 11, 12, 13, 14, 15, 16, 17, 18, 19, 20, 21, 22, 23, 24, 25, 26, 27, 28, 29, 30, 30-35, 35-40, 40-45, 45-50, 50-60, 60-70, 70-80, 80-90, 90-100, 100-150, or 150-200 amino acids in length. Longer or shorter linkers are also contemplated.

[0625] The linker may be as simple as a covalent bond, or it may be a polymeric linker many atoms in length. In certain embodiments, the linker is a polypeptide or based on amino acids. In other embodiments, the linker is not peptide-like. In certain embodiments, the linker is a covalent bond (e.g., a carbon-carbon bond, disulfide bond, carbon-heteroatom bond, etc.). In certain embodiments, the linker is a carbon-nitrogen bond of an amide linkage. In certain embodiments, the linker is a cyclic or acyclic, substituted or unsubstituted, branched or unbranched aliphatic or heteroaliphatic linker. In certain embodiments, the linker is polymeric (e.g., polyethylene, polyethylene glycol, polyamide, polyester, etc.). In certain embodiments, the linker comprises a monomer, dimer, or polymer of aminoalkanoic acid. In certain embodiments, the linker comprises an aminoalkanoic acid (e.g., glycine, ethanoic acid, alanine, beta-alanine, 3-aminopropanoic acid, 4-aminobutanoic acid, 5-pentanoic acid, etc.). In certain embodiments, the linker comprises a monomer, dimer, or polymer of aminoHEXAnoic acid (Ahx). In certain embodiments, the linker is based on a carbocyclic moiety (e.g., cyclopentane, cycloHEXAne). In other embodiments, the linker comprises a polyethylene glycol moiety (PEG). In other embodiments, the linker comprises amino acids. In certain embodiments, the linker comprises a peptide. In certain embodiments, the linker comprises an aryl or heteroaryl moiety. In certain embodiments, the linker is based on a phenyl ring. The linker may included functionalized moieties to facilitate attachment of a nucleophile (e.g., thiol, amino) from the peptide to the linker. Any electrophile may be used as part of the linker. Exemplary electrophiles include, but are not limited to, activated esters, activated amides, Michael acceptors, alkyl halides, aryl halides, acyl halides, and isothiocyanates.

[0626] In some other embodiments, the linker comprises the amino acid sequence (GGGGS)ₙ (SEQ ID NO: 138), (G)ₙ (SEQ ID NO: 139), (EAAAK)ₙ (SEQ ID NO: 12), (GGS). (SEQ ID NO: 140), (SGGS)ₙ (SEQ ID NO: 8), (XP)ₙ (SEQ ID NO: 141), or any combination thereof, wherein n is independently an integer between 1 and 30, and wherein X is any amino acid. In some embodiments, the linker comprises the amino acid sequence (GGS)N(SEQ ID NO: 140), wherein n is 1, 3, or 7. In some embodiments, the linker comprises the amino acid sequence SGSETPGTSESATPES (SEQ ID NO: 142). In some embodiments, the linker comprises the amino acid sequence SGGSSGGSSGSETPGTSESATPESSGGSSGGS (SEQ ID NO: 143). In some embodiments, the linker comprises the amino acid sequence SGGSGGSGGS (SEQ ID NO: 144). In some embodiments, the linker comprises the amino acid sequence SGGS (SEQ ID NO: 8).

[0627] In particular, the following linkers can be used in various embodiments to join prime editor domains with one another:

(SEQ ID NO: 140)
GGS;
(SEQ ID NO: 145)
GGSGGS;
(SEQ ID NO: 146)
GGSGGSGGS;
(SEQ ID NO: 11)
SGGSSGGSSGSETPGTSESATPESSGGSSGGSS;
(SEQ ID NO: 142)
SGSETPGTSESATPES;
(SEQ ID NO: 131)
SGGSSGGSSGSETPGTSESATPESAGSYPYDVPDYAGSAAPAAKKKK
LDGSGSGGSSGGS.

### B. Nuclear Localization Sequence (NLS)

[0628] In various embodiments, the Prime editors may comprise one or more nuclear localization sequences (NLS), which help promote translocation of a protein into the cell nucleus. Such sequences are well-known in the art and can include the following examples:

| DESCRIPTION | SEQUENCE | SEQ ID NO: |
|---|---|---|
| NLS OF SV40 | PKKKRKV | SEQ ID NO: |
| LARGE T-AG | | 26 |
| NLS | MKRTADGSEFESPKKKRKV | SEQ ID NO: |
| | | 29 |
| NLS | MDSLLMNRRKFLYQFKNVRW | SEQ ID NO: |
| | AKGRRETYLC | 27 |
| NLS OF | AVKRPAATKKAGQAKKKKLD | SEQ ID NO: |
| NUCLEOPLASMIN | | 147 |
| NLS OF EGL-13 | MSRRRKANPTKLSENAKKLA | SEQ ID NO: |
| | KEVEN | 148 |
| NLS OF C-MYC | PAAKRVKLD | SEQ ID NO: |
| | | 149 |
| NLS OF TUS- | KLKIKRPVK | SEQ ID NO: |
| PROTEIN | | 150 |
| NLS OF | VSRKRPRP | SEQ ID NO: |
| POLYOMA | | 151 |
| LARGE T-AG | | |
| NLS OF | EGAPPAKRAR | SEQ ID NO: |
| HEPATITIS D | | 152 |
| VIRUS | | |
| ANTIGEN | | |
| NLS OF | PPQPKKKPLDGE | SEQ ID NO: |
| MURINE P53 | | 153 |
| NLS OF PE1 | SGGSKRTADGSEFEPKKKRK | SEQ ID NO: |
| AND PE2 | V | 30 |

[0629] The NLS examples above are non-limiting. The Prime editors may comprise any known NLS sequence, including any of those described in Cokol et al., “Finding nuclear localization signals,” EMBO Rep., 2000, 1(5): 411-415 and Freitas et al., “Mechanisms and Signals for the Nuclear Import of Proteins,” Current Genomics, 2009, 10(8): 550-7, each of which are incorporated herein by reference.

[0630] In various embodiments, the prime editors and constructs encoding the prime editors disclosed herein further comprise one or more, preferably, at least two nuclear localization signals. In certain embodiments, the prime editors comprise at least two NLSs. In embodiments with at least two NLSs, the NLSs can be the same NLSs or they can be different NLSs. In addition, the NLSs may be expressed as part of a fusion protein with the remaining portions of the prime editors. In some embodiments, one or more of the NLSs are bipartite NLSs (“bpNLS”). In certain embodiments, the disclosed fusion proteins comprise two bipartite NLSs. In some embodiments, the disclosed fusion proteins comprise more than two bipartite NLSs.

[0631] The location of the NLS fusion can be at the N-terminus, the C-terminus, or within a sequence of a prime editor (e.g., inserted between the encoded napDNAbp component (e.g., Cas9) and a polymerase domain (e.g., a reverse transcriptase domain).

[0632] The NLSs may be any known NLS sequence in the art. The NLSs may also be any future-discovered NLSs for nuclear localization. The NLSs also may be any naturally-occurring NLS, or any non-naturally occurring NLS (e.g., an NLS with one or more desired mutations).

[0633] The term “nuclear localization sequence” or “NLS” refers to an amino acid sequence that promotes import of a protein into the cell nucleus, for example, by nuclear transport. Nuclear localization sequences are known in the art and would be apparent to the skilled artisan. For example, NLS sequences are described in Plank et al., International PCT application PCT/EP2000/011690, filed Nov. 23, 2000, published as WO/2001/038547 on May 31, 2001, the contents of which are incorporated herein by reference. In some embodiments, an NLS comprises the amino acid sequence PKKKRKV (SEQ ID NO: 26), MDSLLMNRRKFLYQFKNVRWAKGRRETYLC (SEQ ID NO: 27), KRTADGSEFESPKKKRKV (SEQ ID NO: 154), or KRTADGSEFEPKKKRKV (SEQ ID NO: 155). In other embodiments, NLS comprises the amino acid sequences

(SEQ ID NO: 156)
NLSKRPAAIKKAGQAKKKK,
(SEQ ID NO: 149)
PAAKRVKLD,
(SEQ ID NO: 157)
RQRRNELKRSF,
(SEQ ID NO: 158)
NQSSNFGPMKGGNFGGRSSGPYGGGGQYFAKPRNQGGY.

[0634] In one aspect of the disclosure, a prime editor may be modified with one or more nuclear localization signals (NLS), preferably at least two NLSs. In certain embodiments, the prime editors are modified with two or more NLSs. The disclosure contemplates the use of any nuclear localization signal known in the art at the time of the disclosure, or any nuclear localization signal that is identified or otherwise made available in the state of the art after the time of the instant filing. A representative nuclear localization signal is a peptide sequence that directs the protein to the nucleus of the cell in which the sequence is expressed. A nuclear localization signal is predominantly basic, can be positioned almost anywhere in a protein's amino acid sequence, generally comprises a short sequence of four amino acids (Autieri & Agrawal, (1998) J. Biol. Chem. 273: 14731-37, incorporated herein by reference) to eight amino acids, and is typically rich in lysine and arginine residues (Magin et al., (2000) Virology 274: 11-16, incorporated herein by reference). Nuclear localization signals often comprise proline residues. A variety of nuclear localization signals have been identified and have been used to effect transport of biological molecules from the cytoplasm to the nucleus of a cell. See, e.g., Tinland et al., (1992) Proc. Natl. Acad. Sci. U.S.A. 89:7442-46; Moede et al., (1999) FEBS Lett. 461:229-34, which is incorporated by reference. Translocation is currently thought to involve nuclear pore proteins.

[0635] Most NLSs can be classified in three general groups: (i) a monopartite NLS exemplified by the SV40 large T antigen NLS (PKKKRKV (SEQ ID NO: 26)); (ii) a bipartite motif consisting of two basic domains separated by a variable number of spacer amino acids and exemplified by the Xenopus nucleoplasmin NLS (KRXXXXXXXXXXKKKL (SEQ ID NO: 159)); and (iii) noncanonical sequences such as M9 of the hnRNP A1 protein, the influenza virus nucleoprotein NLS, and the yeast Gal4 protein NLS (Dingwall and Laskey 1991).

[0636] Nuclear localization signals appear at various points in the amino acid sequences of proteins. NLS's have been identified at the N-terminus, the C-terminus and in the central region of proteins. Thus, the disclosure provides prime editors that may be modified with one or more NLSs at the C-terminus, the N-terminus, as well as at in internal region of the prime editor. The residues of a longer sequence that do not function as component NLS residues should be selected so as not to interfere, for example tonically or sterically, with the nuclear localization signal itself. Therefore, although there are no strict limits on the composition of an NLS-comprising sequence, in practice, such a sequence can be functionally limited in length and composition.

[0637] The present disclosure contemplates any suitable means by which to modify a prime editor to include one or more NLSs. In one aspect, the prime editors may be engineered to express a prime editor protein that is translationally fused at its N-terminus or its C-terminus (or both) to one or more NLSs, i.e., to form a prime editor-NLS fusion construct. In other embodiments, the prime editor-encoding nucleotide sequence may be genetically modified to incorporate a reading frame that encodes one or more NLSs in an internal region of the encoded prime editor. In addition, the NLSs may include various amino acid linkers or spacer regions encoded between the prime editor and the N-terminally, C-terminally, or internally-attached NLS amino acid sequence, e.g., and in the central region of proteins. Thus, the present disclosure also provides for nucleotide constructs, vectors, and host cells for expressing fusion proteins that comprise a prime editor and one or more NLSs.

[0638] The prime editors described herein may also comprise nuclear localization signals which are linked to a prime editor through one or more linkers, e.g., and polymeric, amino acid, nucleic acid, polysaccharide, chemical, or nucleic acid linker element. The linkers within the contemplated scope of the disclosure are not intended to have any limitations and can be any suitable type of molecule (e.g., polymer, amino acid, polysaccharide, nucleic acid, lipid, or any synthetic chemical linker domain) and be joined to the prime editor by any suitable strategy that effectuates forming a bond (e.g., covalent linkage, hydrogen bonding) between the prime editor and the one or more NLSs.

### C. Flap Endonucleases (e.g., FEN1)

[0639] In various embodiments, the Prime editors may comprise one or more flap endonucleases (e.g., FEN1), which refers to an enzyme that catalyzes the removal of 5′ single strand DNA flaps. These are enzymes that process the removal of 5′ flaps formed during cellular processes, including DNA replication. The prime editing methods herein described may utilize endogenously supplied flap endonucleases or those provided in trans to remove the 5′ flap of endogenous DNA formed at the target site during prime editing. Flap endonucleases are known in the art and can be found described in Patel et al., “Flap endonucleases pass 5′-flaps through a flexible arch using a disorder-thread-order mechanism to confer specificity for free 5′-ends,” Nucleic Acids Research, 2012, 40(10): 4507-4519 and Tsutakawa et al., “Human flap endonuclease structures, DNA double-base flipping, and a unified understanding of the FEN1 superfamily,” Cell, 2011, 145(2): 198-211 (each of which are incorporated herein by reference). An exemplary flap endonuclease is FEN1, which can be represented by the amino acid sequence of SEQ ID NO: 15.

[0640] The flap endonucleases may also include any FEN1 variant, mutant, or other flap endonuclease ortholog, homolog, or variant. Non-limiting FEN1 variant examples are as follows:

| | | SEQ |
|---|---|---|
| Description | Sequence | ID NO: |
| FEN1 | MGIQGLAKLIADVAPSAIRENDIKSYFGRKVAIDASMSIY | SEQ ID NO: |
| K168R | QFLIAVRQGGDVLQNEEGETTSHLMGMFYRTIRMMENG | 160 |
| (relative | IKPVYVFDGKPPQLKSGELAKRSERRAEAEKQLQQAQA | |
| to FEN1 | AGAEQEVEKFTKRLVKVTKQHNDECKHLLSLMGIPYLD | |
| wt) | APSEAEASCAALVRAGKVYAAATEDMDCLTFGSPVLMR | |
| | HLTASEAKKLPIQEFHLSRILQELGLNQEQFVDLCILLGS | |
| | DYCESIRGIGPKRAVDLIQKHKSIEEIVRRLDPNKYPVPEN | |
| | WLHKEAHQLFLEPEVLDPESVELKWSEPNEEELIKFMCG | |
| | EKQFSEERIRSGVKRLSKSRQGSTQGRLDDFFKVTGSLSS | |
| | AKRKEPEPKGSTKKKAKTGAAGKFKRGK | |
| FEN1 | MGIQGLAKLIADVAPSAIRENDIKSYFGRKVAIDASMSIY | SEQ ID NO: |
| S187A | QFLIAVRQGGDVLQNEEGETTSHLMGMFYRTIRMMENG | 161 |
| (relative | IKPVYVFDGKPPQLKSGELAKRSERRAEAEKQLQQAQA | |
| to FEN1 | AGAEQEVEKFTKRLVKVTKQHNDECKHLLSLMGIPYLD | |
| wt) | APSEAEASCAALVKAGKVYAAATEDMDCLTFGAPVLM | |
| | RHLTASEAKKLPIQEFHLSRILQELGLNQEQFVDLCILLGS | |
| | DYCESIRGIGPKRAVDLIQKHKSIEEIVRRLDPNKYPVPEN | |
| | WLHKEAHQLFLEPEVLDPESVELKWSEPNEEELIKFMCG | |
| | EKQFSEERIRSGVKRLSKSRQGSTQGRLDDFFKVTGSLSS | |
| | AKRKEPEPKGSTKKKAKTGAAGKFKRGK | |
| FEN1 | MGIQGLAKLIADVAPSAIRENDIKSYFGRKVAIDASMSIY | SEQ ID NO: |
| K354R | QFLIAVRQGGDVLQNEEGETTSHLMGMFYRTIRMMENG | 162 |
| (relative | IKPVYVFDGKPPQLKSGELAKRSERRAEAEKQLQQAQA | |
| to FEN1 | AGAEQEVEKFTKRLVKVTKQHNDECKHLLSLMGIPYLD | |
| wt) | APSEAEASCAALVKAGKVYAAATEDMDCLTFGSPVLMR | |
| | HLTASEAKKLPIQEFHLSRILQELGLNQEQFVDLCILLGS | |
| | DYCESIRGIGPKRAVDLIQKHKSIEEIVRRLDPNKYPVPEN | |
| | WLHKEAHQLFLEPEVLDPESVELKWSEPNEEELIKFMCG | |
| | EKQFSEERIRSGVKRLSKSRQGSTQGRLDDFFKVTGSLSS | |
| | ARRKEPEPKGSTKKKAKTGAAGKFKRGK | |
| GEN1 | MGVNDLWQILEPVKQHIPLRNLGGKTIAVDLSLWVCEA | SEQ ID NO: |
| | QTVKKMMGSVMKPHLRNLFFRISYLTQMDVKLVFVME | 163 |
| | GEPPKLKADVISKRNQSRYGSSGKSWSQKTGRSHFKSVL | |
| | RECLHMLECLGIPWVQAAGEAEAMCAYLNAGGHVDGC | |
| | LTNDGDTFLYGAQTVYRNFTMNTKDPHVDCYTMSSIKS | |
| | KLGLDRDALVGLAILLGCDYLPKGVPGVGKEQALKLIQI | |
| | LKGQSLLQRFNRWNETSCNSSPQLLVTKKLAHCSVCSHP | |
| | GSPKDHERNGCRLCKSDKYCEPHDYEYCCPCEWHRTEH | |
| | DRQLSEVENNIKKKACCCEGFPFHEVIQEFLLNKDKLVK | |
| | VIRYQRPDLLLFQRFTLEKMEWPNHYACEKLLVLLTHY | |
| | DMIERKLGSRNSNQLQPIRIVKTRIRNGVHCFEIEWEKPE | |
| | HYAMEDKQHGEFALLTIEEESLFEAAYPEIVAVYQKQKL | |
| | EIKGKKQKRIKPKENNLPEPDEVMSFQSHMTLKPTCEIFH | |
| | KQNSKLNSGISPDPTLPQESISASLNSLLLPKNTPCLNAQE | |
| | QFMSSLRPLAIQQIKAVSKSLISESSQPNTSSHNISVIADLH | |
| | LSTIDWEGTSFSNSPAIQRNTFSHDLKSEVESELSAIPDGF | |
| | ENIPEQLSCESERYTANIKKVLDEDSDGISPEEHLLSGITD | |
| | LCLQDLPLKERIFTKLSYPQDNLQPDVNLKTLSILSVKES | |
| | CIANSGSDCTSHLSKDLPGIPLQNESRDSKILKGDQLLQE | |
| | DYKVNTSVPYSVSNTVVKTCNVRPPNTALDHSRKVDM | |
| | QTTRKILMKKSVCLDRHSSDEQSAPVFGKAKYTTQRMK | |
| | HSSQKHNSSHFKESGHNKLSSPKIHIKETEQCVRSYETAE | |
| | NEESCFPDSTKSSLSSLQCHKKENNSGTCLDSPLPLRQRL | |
| | KLRFQST | |
| ERCC5 | MGVQGLWKLLECSGRQVSPEALEGKILAVDISIWLNQAL | SEQ ID NO: |
| | KGVRDRHGNSIENPHLLTLFHRLCKLLFFRIRPIFVFDGD | 164 |
| | APLLKKQTLVKRRQRKDLASSDSRKTTEKLLKTFLKRQA | |
| | IKTAFRSKRDEALPSLTQVRRENDLYVLPPLQEEEKHSSE | |
| | EEDEKEWQERMNQKQALQEEFFHNPQAIDIESEDFSSLPP | |
| | EVKHEILTDMKEFTKRRRTLFEAMPEESDDFSQYQLKGL | |
| | LKKNYLNQHIEHVQKEMNQQHSGHIRRQYEDEGGFLKE | |
| | VESRRVVSEDTSHYILIKGIQAKTVAEVDSESLPSSSKMH | |
| | GMSFDVKSSPCEKLKTEKEPDATPPSPRTLLAMQAALLG | |
| | SSSEEELESENRRQARGRNAPAAVDEGSISPRTLSAIKRA | |
| | LDDDEDVKVCAGDDVQTGGPGAEEMRINSSTENSDEGL | |
| | KVRDGKGIPFTATLASSSVNSAEEHVASTNEGREPTDSV | |
| | PKEQMSLVHVGTEAFPISDESMIKDRKDRLPLESAVVRH | |
| | SDAPGLPNGRELTPASPTCTNSVSKNETHAEVLEQQNEL | |
| | CPYESKFDSSLLSSDDETKCKPNSASEVIGPVSLQETSSIV | |
| | SVPSEAVDNVENVVSFNAKEHENFLETIQEQQTTESAGQ | |
| | DLISIPKAVEPMEIDSEESESDGSFIEVQSVISDEELQAEFP | |
| | ETSKPPSEQGEEELVGTREGEAPAESESLLRDNSERDDVD | |
| | GEPQEAEKDAEDSLHEWQDINLEELETLESNLLAQQNSL | |
| | KAQKQQQERIAATVTGQMFLESQELLRLFGIPYIQAPME | |
| | AEAQCAILDLTDQTSGTITDDSDIWLFGARHVYRNFFNK | |
| | NKFVEYYQYVDFHNQLGLDRNKLINLAYLLGSDYTEGIP | |
| | TVGCVTAMEILNEFPGHGLEPLLKFSEWWHEAQKNPKIR | |
| | PNPHDTKVKKKLRTLQLTPGFPNPAVAEAYLKPVVDDS | |
| | KGSFLWGKPDLDKIREFCQRYFGWNRTKTDESLFPVLK | |
| | QLDAQQTQLRIDSFFRLAQQEKEDAKRIKSQRLNRAVTC | |
| | MLRKEKEAAASEIEAVSVAMEKEFELLDKAKRKTQKRG | |
| | ITNTLEESSSLKRKRLSDSKRKNTCGGFLGETCLSESSDG | |
| | SSSEDAESSSLMNVQRRTAAKEPKTSASDSQNSVKEAPV | |
| | KNGGATTSSSSDSDDDGGKEKMVLVTARSVFGKKRRKL | |
| | RRARGRKRKT | |

[0641] In various embodiments, the prime editor contemplated herein may include any flap endonuclease variant of the above-disclosed sequences having an amino acid sequence that is at least about 70% identical, at least about 80% identical, at least about 90% identical, at least about 95% identical, at least about 96% identical, at least about 97% identical, at least about 98% identical, at least about 99% identical, at least about 99.5% identical, or at least about 99.9% identical to any of the above sequences.

[0642] Other endonucleases that may be utilized by the instant methods to facilitate removal of the 5′ end single strand DNA flap include, but are not limited to (1) trex 2, (2) exo1 endonuclease (e.g., Keijzers et al., Biosci Rep. 2015, 35(3): e00206)

### Trex 2

[0643] 3′ three prime repair exonuclease 2 (TREX2)—human

[0644] Accession No. NM_080701

(SEQ ID NO: 165)
MSEAPRAETFVFLDLEATGLPSVEPEIAELSLFAVHRSSLENPEHDESGA
LVLPRVLDKLTLCMCPERPFTAKASEITGLSSEGLARCRKAGFDGAVVRT
LQAFLSRQAGPICLVAHNGFDYDFPLLCAELRRLGARLPRDTVCLDTLPA
LRGLDRAHSHGTRARGRQGYSLGSLFHRYFRAEPSAAHSAEGDVHTLLLI
FLHRAAELLAWADEQARGWAHIEPMYLPPDDPSLEA.

[0645] 3′ three prime repair exonuclease 2 (TREX2)—mouse

[0646] Accession No. NM_011907

(SEQ ID NO: 166)
MSEPPRAETFVFLDLEATGLPNMDPEIAEISLFAVHRSSLENPERDDSGS
LVLPRVLDKLTLCMCPERPFTAKASEITGLSSESLMHCGKAGFNGAVVRT
LQGFLSRQEGPICLVAHNGFDYDFPLLCTELQRLGAHLPQDTVCLDTLPA
LRGLDRAHSHGTRAQGRKSYSLASLFHRYFQAEPSAAHSAEGDVHTLLLI
FLHRAPELLAWADEQARSWAHIEPMYVPPDGPSLEA.

[0647] 3′ three prime repair exonuclease 2 (TREX2)—rat

[0648] Accession No. NM_001107580

(SEQ ID NO: 167)
MSEPLRAETFVFLDLEATGLPNMDPEIAEISLFAVHRSSLENPERDDSGS
LVLPRVLDKLTLCMCPERPFTAKASEITGLSSEGLMNCRKAAFNDAVVRT
LQGFLSRQEGPICLVAHNGFDYDFPLLCTELQRLGAHLPRDTVCLDTLPA
LRGLDRVHSHGTRAQGRKSYSLASLFHRYFQAEPSAAHSAEGDVNTLLLI
FLHRAPELLAWADEQARSWAHIEPMYVPPDGPSLEA.

### ExoI

[0649] Human exonuclease 1 (EXO1) has been implicated in many different DNA metabolic processes, including DNA mismatch repair (MMR), micro-mediated end-joining, homologous recombination (HR), and replication. Human EXO1 belongs to a family of eukaryotic nucleases, Rad2/XPG, which also include FEN1 and GEN1. The Rad2/XPG family is conserved in the nuclease domain through species from phage to human. The EXO1 gene product exhibits both 5′ exonuclease and 5′ flap activity. Additionally, EXO1 contains an intrinsic 5′ RNase H activity. Human EXO1 has a high affinity for processing double stranded DNA (dsDNA), nicks, gaps, pseudo Y structures and can resolve Holliday junctions using its inherit flap activity. Human EXO1 is implicated in MMR and contain conserved binding domains interacting directly with MLH1 and MSH2. EXO1 nucleolytic activity is positively stimulated by PCNA, MutSα (MSH2/MSH6 complex), 14-3-3, MRN and 9-1-1 complex.

[0650] exonuclease 1 (EXO1) Accession No. NM_003686 (Homo sapiens exonuclease 1 (EXO1), transcript variant 3)—isoform A

(SEQ ID NO: 168)
MGIQGLLQFIKEASEPIHVRKYKGQVVAVDTYCWLHKGAIACAEKLAKGE
PTDRYVGFCMKFVNMLLSHGIKPILVFDGCTLPSKKEVERSRRERRQANL
LKGKQLLREGKVSEARECFTRSINITHAMAHKVIKAARSQGVDCLVAPYE
ADAQLAYLNKAGIVQAIITEDSDLLAFGCKKVILKMDQFGNGLEIDQARL
GMCRQLGDVFTEEKFRYMCILSGCDYLSSLRGIGLAKACKVLRLANNPDI
VKVIKKIGHYLKMNITVPEDYINGFIRANNTFLYQLVFDPIKRKLIPLNA
YEDDVDPETLSYAGQYVDDSIALQIALGNKDINTFEQIDDYNPDTAMPAH
SRSHSWDDKTCQKSANVSSIWHRNYSPRPESGTVSDAPQLKENPSTVGVE
RVISTKGLNLPRKSSIVKRPRSAELSEDDLLSQYSLSFTKKTKKNSSEGN
KSLSFSEVFVPDLVNGPTNKKSVSTPPRTRNKFATFLQRKNEESGAVVVP
GTRSRFFCSSDSTDCVSNKVSIQPLDETAVTDKENNLHESEYGDQEGKRL
VDTDVARNSSDDIPNNHIPGDHIPDKATVFTDEESYSFESSKFTRTISPP
TLGTLRSCFSWSGGLGDFSRTPSPSPSTALQQFRRKSDSPTSLPENNMSD
VSQLKSEESSDDESHPLREEACSSQSQESGEFSLQSSNASKLSQCSSKDS
DSEESDCNIKLLDSQSDQTSKLRLSHFSKKDTPLRNKVPGLYKSSSADSL
STTKIKPLGPARASGLSKKPASIQKRKHHNAENKPGLQIKLNELWKNFGF
KKF.

[0651] exonuclease 1 (EXO1) Accession No. NM_006027 (Homo sapiens exonuclease 1 (EXO1), transcript variant 3)—isoform B

(SEQ ID NO: 169)
MGIQGLLQFIKEASEPIHVRKYKGQVVAVDTYCWLHKGAIACAEKLAKGE
PTDRYVGFCMKFVNMLLSHGIKPILVFDGCTLPSKKEVERSRRERRQANL
LKGKQLLREGKVSEARECFTRSINITHAMAHKVIKAARSQGVDCLVAPYE
ADAQLAYLNKAGIVQAIITEDSDLLAFGCKKVILKMDQFGNGLEIDQARL
GMCRQLGDVFTEEKFRYMCILSGCDYLSSLRGIGLAKACKVLRLANNPDI
VKVIKKIGHYLKMNITVPEDYINGFIRANNTFLYQLVFDPIKRKLIPLNA
YEDDVDPETLSYAGQYVDDSIALQIALGNKDINTFEQIDDYNPDTAMPAH
SRSHSWDDKTCQKSANVSSIWHRNYSPRPESGTVSDAPQLKENPSTVGVE
RVISTKGLNLPRKSSIVKRPRSAELSEDDLLSQYSLSFTKKTKKNSSEGN
KSLSFSEVFVPDLVNGPTNKKSVSTPPRTRNKFATFLQRKNEESGAVVVP
GTRSRFFCSSDSTDCVSNKVSIQPLDETAVTDKENNLHESEYGDQEGKRL
VDTDVARNSSDDIPNNHIPGDHIPDKATVFTDEESYSFESSKFTRTISPP
TLGTLRSCFSWSGGLGDFSRTPSPSPSTALQQFRRKSDSPTSLPENNMSD
VSQLKSEESSDDESHPLREEACSSQSQESGEFSLQSSNASKLSQCSSKDS
DSEESDCNIKLLDSQSDQTSKLRLSHFSKKDTPLRNKVPGLYKSSSADSL
STTKIKPLGPARASGLSKKPASIQKRKHHNAENKPGLQIKLNELWKNFGF
KKDSEKLPPCKKPLSPVRDNIQLTPEAEEDIFNKPECGRVQRAIFQ.

[0652] exonuclease 1 (EXO1) Accession No. NM_001319224 (Homo sapiens exonuclease 1 (EXO1), transcript variant 4)—isoform C

(SEQ ID NO: 170)
MGIQGLLQFIKEASEPIHVRKYKGQVVAVDTYCWLHKGAIACAEKLAKGE
PTDRYVGFCMKFVNMLLSHGIKPILVFDGCTLPSKKEVERSRRERRQANL
LKGKQLLREGKVSEARECFTRSINITHAMAHKVIKAARSQGVDCLVAPYE
ADAQLAYLNKAGIVQAIITEDSDLLAFGCKKVILKMDQFGNGLEIDQARL
GMCRQLGDVFTEEKFRYMCILSGCDYLSSLRGIGLAKACKVLRLANNPDI
VKVIKKIGHYLKMNITVPEDYINGFIRANNTFLYQLVFDPIKRKLIPLNA
YEDDVDPETLSYAGQYVDDSIALQIALGNKDINTFEQIDDYNPDTAMPAH
SRSHSWDDKTCQKSANVSSIWHRNYSPRPESGTVSDAPQLKENPSTVGVE
RVISTKGLNLPRKSSIVKRPRSELSEDDLLSQYSLSFTKKTKKNSSEGNK
SLSFSEVFVPDLVNGPTNKKSVSTPPRTRNKFATFLQRKNEESGAVVVPG
TRSRFFCSSDSTDCVSNKVSIQPLDETAVTDKENNLHESEYGDQEGKRLV
DTDVARNSSDDIPNNHIPGDHIPDKATVFTDEESYSFESSKFTRTISPPT
LGTLRSCFSWSGGLGDFSRTPSPSPSTALQQFRRKSDSPTSLPENNMSDV
SQLKSEESSDDESHPLREEACSSQSQESGEFSLQSSNASKLSQCSSKDSD
SEESDCNIKLLDSQSDQTSKLRLSHFSKKDTPLRNKVPGLYKSSSADSLS
TTKIKPLGPARASGLSKKPASIQKRKHHNAENKPGLQIKLNELWKNFGFK
KDSEKLPPCKKPLSPVRDNIQLTPEAEEDIFNKPECGRVQRAIFQ.

### D. Inteins and Split-Inteins

[0653] It will be understood that in some embodiments (e.g., delivery of a prime editor in vivo using AAV particles), it may be advantageous to split a polypeptide (e.g., a deaminase or a napDNAbp) or a fusion protein (e.g., a prime editor) into an N-terminal half and a C-terminal half, delivery them separately, and then allow their colocalization to reform the complete protein (or fusion protein as the case may be) within the cell. Separate halves of a protein or a fusion protein may each comprise a split-intein tag to facilitate the reformation of the complete protein or fusion protein by the mechanism of protein trans splicing.

[0654] Protein trans-splicing, catalyzed by split inteins, provides an entirely enzymatic method for protein ligation. A split-intein is essentially a contiguous intein (e.g. a mini-intein) split into two pieces named N-intein and C-intein, respectively. The N-intein and C-intein of a split intein can associate non-covalently to form an active intein and catalyze the splicing reaction essentially in same way as a contiguous intein does. Split inteins have been found in nature and also engineered in laboratories. As used herein, the term “split intein” refers to any intein in which one or more peptide bond breaks exists between the N-terminal and C-terminal amino acid sequences such that the N-terminal and C-terminal sequences become separate molecules that can non-covalently reassociate, or reconstitute, into an intein that is functional for trans-splicing reactions. Any catalytically active intein, or fragment thereof, may be used to derive a split intein for use in the methods of the invention. For example, in one aspect the split intein may be derived from a eukaryotic intein. In another aspect, the split intein may be derived from a bacterial intein. In another aspect, the split intein may be derived from an archaeal intein. Preferably, the split intein so-derived will possess only the amino acid sequences essential for catalyzing trans-splicing reactions.

[0655] As used herein, the “N-terminal split intein (In)” refers to any intein sequence that comprises an N-terminal amino acid sequence that is functional for trans-splicing reactions. An In thus also comprises a sequence that is spliced out when trans-splicing occurs. An In can comprise a sequence that is a modification of the N-terminal portion of a naturally occurring intein sequence. For example, an In can comprise additional amino acid residues and/or mutated residues so long as the inclusion of such additional and/or mutated residues does not render the In non-functional in trans-splicing. Preferably, the inclusion of the additional and/or mutated residues improves or enhances the trans-splicing activity of the In.

[0656] As used herein, the “C-terminal split intein (Ic)” refers to any intein sequence that comprises a C-terminal amino acid sequence that is functional for trans-splicing reactions. In one aspect, the Ic comprises 4 to 7 contiguous amino acid residues, at least 4 amino acids of which are from the last β-strand of the intein from which it was derived. An Ic thus also comprises a sequence that is spliced out when trans-splicing occurs. An Ic can comprise a sequence that is a modification of the C-terminal portion of a naturally occurring intein sequence. For example, an Ic can comprise additional amino acid residues and/or mutated residues so long as the inclusion of such additional and/or mutated residues does not render the In non-functional in trans-splicing. Preferably, the inclusion of the additional and/or mutated residues improves or enhances the trans-splicing activity of the Ic.

[0657] In some embodiments of the invention, a peptide linked to an Ic or an In can comprise an additional chemical moiety including, among others, fluorescence groups, biotin, polyethylene glycol (PEG), amino acid analogs, unnatural amino acids, phosphate groups, glycosyl groups, radioisotope labels, and pharmaceutical molecules. In other embodiments, a peptide linked to an Ic can comprise one or more chemically reactive groups including, among others, ketone, aldehyde, Cys residues and Lys residues. The N-intein and C-intein of a split intein can associate non-covalently to form an active intein and catalyze the splicing reaction when an “intein-splicing polypeptide (ISP)” is present. As used herein, “intein-splicing polypeptide (ISP)” refers to the portion of the amino acid sequence of a split intein that remains when the Ic, In, or both, are removed from the split intein. In certain embodiments, the In comprises the ISP. In another embodiment, the Ic comprises the ISP. In yet another embodiment, the ISP is a separate peptide that is not covalently linked to In nor to Ic.

[0658] Split inteins may be created from contiguous inteins by engineering one or more split sites in the unstructured loop or intervening amino acid sequence between the −12 conserved beta-strands found in the structure of mini-inteins. Some flexibility in the position of the split site within regions between the beta-strands may exist, provided that creation of the split will not disrupt the structure of the intein, the structured beta-strands in particular, to a sufficient degree that protein splicing activity is lost.

[0659] In protein trans-splicing, one precursor protein consists of an N-extein part followed by the N-intein, another precursor protein consists of the C-intein followed by a C-extein part, and a trans-splicing reaction (catalyzed by the N- and C-inteins together) excises the two intein sequences and links the two extein sequences with a peptide bond. Protein trans-splicing, being an enzymatic reaction, can work with very low (e.g. micromolar) concentrations of proteins and can be carried out under physiological conditions.

[0660] Exemplary sequences are represented by SEQ ID NOs: 16-23.

[0661] Although inteins are most frequently found as a contiguous domain, some exist in a naturally split form. In this case, the two fragments are expressed as separate polypeptides and must associate before splicing takes place, so-called protein trans-splicing.

[0662] An exemplary split intein is the Ssp DnaE intein, which comprises two subunits, namely, DnaE-N and DnaE-C. The two different subunits are encoded by separate genes, namely dnaE-n and dnaE-c, which encode the DnaE-N and DnaE-C subunits, respectively. DnaE is a naturally occurring split intein in Synechocytis sp. PCC6803 and is capable of directing trans-splicing of two separate proteins, each comprising a fusion with either DnaE-N or DnaE-C.

[0663] Additional naturally occurring or engineered split-intein sequences are known in the or can be made from whole-intein sequences described herein or those available in the art. Examples of split-intein sequences can be found in Stevens et al., “A promiscuous split intein with expanded protein engineering applications,” PNAS, 2017, Vol. 114: 8538-8543; Iwai et al., “Highly efficient protein trans-splicing by a naturally split DnaE intein from Nostoc punctiforme, FEBS Lett, 580: 1853-1858, each of which are incorporated herein by reference. Additional split intein sequences can be found, for example, in WO 2013/045632, WO 2014/055782, WO 2016/069774, and EP2877490, the contents each of which are incorporated herein by reference.

[0664] In addition, protein splicing in trans has been described in vivo and in vitro (Shingledecker, et al., Gene 207:187 (1998), Southworth, et al., EMBO J. 17:918 (1998); Mills, et al., Proc. Natl. Acad. Sci. USA, 95:3543-3548 (1998); Lew, et al., J. Biol. Chem., 273:15887-15890 (1998); Wu, et al., Biochim. Biophys. Acta 35732:1 (1998b), Yamazaki, et al., J. Am. Chem. Soc. 120:5591 (1998), Evans, et al., J. Biol. Chem. 275:9091 (2000); Otomo, et al., Biochemistry 38:16040-16044 (1999); Otomo, et al., J. Biolmol. NMR 14:105-114 (1999); Scott, et al., Proc. Natl. Acad. Sci. USA 96:13638-13643 (1999)) and provides the opportunity to express a protein as to two inactive fragments that subsequently undergo ligation to form a functional product, e.g., as shown in FIGS. 66 and 67 with regard to the formation of a complete Prime editor from two separately-expressed halves.

### E. RNA-Protein Interaction Domain

[0665] In various embodiments, two separate protein domains (e.g., a Cas9 domain and a polymerase domain) may be colocalized to one another to form a functional complex (akin to the function of a fusion protein comprising the two separate protein domains) by using an “RNA-protein recruitment system,” such as the “MS2 tagging technique.” Such systems generally tag one protein domain with an “RNA-protein interaction domain” (aka “RNA-protein recruitment domain”) and the other with an “RNA-binding protein” that specifically recognizes and binds to the RNA-protein interaction domain, e.g., a specific hairpin structure. These types of systems can be leveraged to colocalize the domains of a prime editor, as well as to recruitment additional functionalities to a prime editor, such as a UGI domain. In one example, the MS2 tagging technique is based on the natural interaction of the MS2 bacteriophage coat protein (“MCP” or “MS2cp”) with a stem-loop or hairpin structure present in the genome of the phage, i.e., the “MS2 hairpin.” In the case of the MS2 hairpin, it is recognized and bound by the MS2 bacteriophage coat protein (MCP). Thus, in one exemplary scenario a deaminase-MS2 fusion can recruit a Cas9-MCP fusion.

[0666] A review of other modular RNA-protein interaction domains are described in the art, for example, in Johansson et al., “RNA recognition by the MS2 phage coat protein,” Sem Virol., 1997, Vol. 8(3): 176-185; Delebecque et al., “Organization of intracellular reactions with rationally designed RNA assemblies,” Science, 2011, Vol. 333: 470-474; Mali et al., “Cas9 transcriptional activators for target specificity screening and paired nickases for cooperative genome engineering,” Nat. Biotechnol., 2013, Vol. 31: 833-838; and Zalatan et al., “Engineering complex synthetic transcriptional programs with CRISPR RNA scaffolds,” Cell, 2015, Vol. 160: 339-350, each of which are incorporated herein by reference in their entireties. Other systems include the PP7 hairpin, which specifically recruits the PCP protein, and the “com” hairpin, which specifically recruits the Com protein. See Zalatan et al.

[0667] The nucleotide sequence of the MS2 hairpin is represented by SEQ ID NO: 24.

[0668] The amino acid sequence of the MCP or MS2cp is represented by SEQ ID NO: 25.

### F. UGI Domain

[0669] In other embodiments, the prime editors described herein may comprise one or more uracil glycosylase inhibitor domains. The term “uracil glycosylase inhibitor (UGI)” or “UGI domain,” as used herein, refers to a protein that is capable of inhibiting a uracil-DNA glycosylase base-excision repair enzyme. In some embodiments, a UGI domain comprises a wild-type UGI or a UGI as set forth in SEQ ID NO: 171. In some embodiments, the UGI proteins provided herein include fragments of UGI and proteins homologous to a UGI or a UGI fragment. For example, in some embodiments, a UGI domain comprises a fragment of the amino acid sequence set forth in SEQ ID NO: 171. In some embodiments, a UGI fragment comprises an amino acid sequence that comprises at least 60%, at least 65%, at least 70%, at least 75%, at least 80%, at least 85%, at least 90%, at least 95%, at least 96%, at least 97%, at least 98%, at least 99%, or at least 99.5% of the amino acid sequence as set forth in SEQ ID NO: 171. In some embodiments, a UGI comprises an amino acid sequence homologous to the amino acid sequence set forth in SEQ ID NO: 171, or an amino acid sequence homologous to a fragment of the amino acid sequence set forth in SEQ ID NO: 171. In some embodiments, proteins comprising UGI or fragments of UGI or homologs of UGI or UGI fragments are referred to as “UGI variants.” A UGI variant shares homology to UGI, or a fragment thereof. For example a UGI variant is at least 70% identical, at least 75% identical, at least 80% identical, at least 85% identical, at least 90% identical, at least 95% identical, at least 96% identical, at least 97% identical, at least 98% identical, at least 99% identical, at least 99.5% identical, or at least 99.9% identical to a wild type UGI or a UGI as set forth in SEQ ID NO: 171. In some embodiments, the UGI variant comprises a fragment of UGI, such that the fragment is at least 70% identical, at least 80% identical, at least 90% identical, at least 95% identical, at least 96% identical, at least 97% identical, at least 98% identical, at least 99% identical, at least 99.5% identical, or at least 99.9% to the corresponding fragment of wild-type UGI or a UGI as set forth in SEQ ID NO: 171. In some embodiments, the UGI comprises the following amino acid sequence:

[0670] Uracil-DNA glycosylase inhibitor:

(SEQ ID NO: 171)
>sp|P14739|UNGI_BPPB2
MTNLSDIIEKETGKQLVIQESILMLPEEVEEVIGNKPESDILVHTAYDES
TDENVMLLTSDAPEYKPWALVIQDSNGENKIKML.

[0671] The prime editors described herein may comprise more than one UGI domain, which may be separated by one or more linkers as described herein.

### G. Additional PE Elements

[0672] In certain embodiments, the prime editors described herein may comprise an inhibitor of base repair. The term “inhibitor of base repair” or “IBR” refers to a protein that is capable in inhibiting the activity of a nucleic acid repair enzyme, for example a base excision repair enzyme. In some embodiments, the IBR is an inhibitor of OGG base excision repair. In some embodiments, the IBR is an inhibitor of base excision repair (“iBER”). Exemplary inhibitors of base excision repair include inhibitors of APE 1, Endo III, Endo IV, Endo V, Endo VIII, Fpg, hOGG1, hNEIL1, T7 EndoI, T4PDG, UDG, hSMUG1, and hAAG. In some embodiments, the IBR is an inhibitor of Endo V or hAAG. In some embodiments, the IBR is an iBER that may be a catalytically inactive glycosylase or catalytically inactive dioxygenase or a small molecule or peptide inhibitor of an oxidase, or variants thereof. In some embodiments, the IBR is an iBER that may be a TDG inhibitor, MBD4 inhibitor or an inhibitor of an AlkBH enzyme. In some embodiments, the IBR is an iBER that comprises a catalytically inactive TDG or catalytically inactive MBD4. An exemplary catalytically inactive TDG is an N140A mutant of SEQ ID NO: 175 (human TDG).

[0673] Some exemplary glycosylases are provided below. The catalytically inactivated variants of any of these glycosylase domains are iBERs that may be fused to the napDNAbp or polymerase domain of the prime editors provided in this disclosure.

OGG (human)
(SEQ ID NO: 172)
MPARALLPRRMGHRTLASTPALWASIPCPRSELRLDLVLPSGQSFRWREQ
SPAHWSGVLADQVWTLTQTEEQLHCTVYRGDKSQASRPTPDELEAVRKYF
QLDVTLAQLYHHWGSVDSHFQEVAQKFQGVRLLRQDPIECLFSFICSSNN
NIARITGMVERLCQAFGPRLIQLDDVTYHGFPSLQALAGPEVEAHLRKLG
LGYRARYVSASARAILEEQGGLAWLQQLRESSYEEAHKALCILPGVGTKV
ADCICLMALDKPQAVPVDVHMWHIAQRDYSWHPTTSQAKGPSPQTNKELG
NFFRSLWGPYAGWAQAVLFSADLRQSRHAQEPPAKRRKGSKGPEG
MPG (human)
(SEQ ID NO: 173)
MVTPALQMKKPKQFCRRMGQKKQRPARAGQPHSSSDAAQAPAEQPHSSSD
AAQAPCPRERCLGPPTTPGPYRSIYFSSPKGHLTRLGLEFFDQPAVPLAR
AFLGQVLVRRLPNGTELRGRIVETEAYLGPEDEAAHSRGGRQTPRNRGMF
MKPGTLYVYIIYGMYFCMNISSQGDGACVLLRALEPLEGLETMRQLRSTL
RKGTASRVLKDRELCSGPSKLCQALAINKSFDQRDLAQDEAVWLERGPLE
PSEPAVVAAARVGVGHAGEWARKPLRFYVRGSPWVSVVDRVAEQDTQA
MBD4 (human)
(SEQ ID NO: 174)
MGTTGLESLSLGDRGAAPTVTSSERLVPDPPNDLRKEDVAMELERVGEDE
EQMMIKRSSECNPLLQEPIASAQFGATAGTECRKSVPCGWERVVKQRLFG
KTAGRFDVYFISPQGLKFRSKSSLANYLHKNGETSLKPEDFDFTVLSKRG
IKSRYKDCSMAALTSHLQNQSNNSNWNLRTRSKCKKDVFMPPSSSSELQE
SRGLSNFTSTHLLLKEDEGVDDVNFRKVRKPKGKVTILKGIPIKKTKKGC
RKSCSGFVQSDSKRESVCNKADAESEPVAQKSQLDRTVCISDAGACGETL
SVTSEENSLVKKKERSLSSGSNFCSEQKTSGIINKFCSAKDSEHNEKYED
TFLESEEIGTKVEVVERKEHLHTDILKRGSEMDNNCSPTRKDFTGEKIFQ
EDTIPRTQIERRKTSLYFSSKYNKEALSPPRRKAFKKWTPPRSPFNLVQE
TLFHDPWKLLIATIFLNRTSGKMAIPVLWKFLEKYPSAEVARTADWRDVS
ELLKPLGLYDLRAKTIVKFSDEYLTKQWKYPIELHGIGKYGNDSYRIFCV
NEWKQVHPEDHKLNKYHDWLWENHEKLSLS
TDG (human)
(SEQ ID NO: 175)
MEAENAGSYSLQQAQAFYTFPFQQLMAEAPNMAVVNEQQMPEEVPAPAPA
QEPVQEAPKGRKRKPRTTEPKQPVEPKKPVESKKSGKSAKSKEKQEKITD
TFKVKRKVDRFNGVSEAELLTKTLPDILTFNLDIVIIGINPGLMAAYKGH
HYPGPGNHFWKCLFMSGLSEVQLNHMDDHTLPGKYGIGFTNMVERTTPGS
KDLSSKEFREGGRILVQKLQKYQPRIAVFNGKCIYEIFSKEVFGVKVKNL
EFGLQPHKIPDTETLCYVMPSSSARCAQFPRAQDKVHYYIKLKDLRDQLK
GIERNMDVQEVQYTFDLQLAQEDAKKMAVKEEKYDPGYEAAYGGAYGENP
CSSEPCGFSSNGLIESVELRGESAFSGIPNGQWMTQSFTDQIPSFSNHCG
TQEQEEESHA

[0674] In some embodiments, the fusion proteins described herein may comprise one or more heterologous protein domains (e.g., about or more than about 1, 2, 3, 4, 5, 6, 7, 8, 9, 10, or more domains in addition to the prime editor components). A fusion protein may comprise any additional protein sequence, and optionally a linker sequence between any two domains. Other exemplary features that may be present are localization sequences, such as cytoplasmic localization sequences, export sequences, such as nuclear export sequences, or other localization sequences, as well as sequence tags that are useful for solubilization, purification, or detection of the fusion proteins.

[0675] Examples of protein domains that may be fused to a prime editor or component thereof (e.g., the napDNAbp domain, the polymerase domain, or the NLS domain) include, without limitation, epitope tags, and reporter gene sequences. Non-limiting examples of epitope tags include histidine (His) tags, V5 tags, FLAG tags, influenza hemagglutinin (HA) tags, Myc tags, VSV-G tags, and thioredoxin (Trx) tags. Examples of reporter genes include, but are not limited to, glutathione-5-transferase (GST), horseradish peroxidase (HRP), chloramphenicol acetyltransferase (CAT), beta-galactosidase, beta-glucuronidase, luciferase, green fluorescent protein (GFP), HcRed, DsRed, cyan fluorescent protein (CFP), yellow fluorescent protein (YFP), and autofluorescent proteins including blue fluorescent protein (BFP). A prime editor may be fused to a gene sequence encoding a protein or a fragment of a protein that bind DNA molecules or bind other cellular molecules, including, but not limited to, maltose binding protein (MBP), S-tag, Lex A DNA binding domain (DBD) fusions, GAL4 DNA binding domain fusions, and herpes simplex virus (HSV) BP16 protein fusions. Additional domains that may form part of a prime editor are described in US Patent Publication No. 2011/0059502, published Mar. 10, 2011 and incorporated herein by reference in its entirety.

[0676] In an aspect of the disclosure, a reporter gene which includes, but is not limited to, glutathione-5-transferase (GST), horseradish peroxidase (HRP), chloramphenicol acetyltransferase (CAT) beta-galactosidase, beta-glucuronidase, luciferase, green fluorescent protein (GFP), HcRed, DsRed, cyan fluorescent protein (CFP), yellow fluorescent protein (YFP), and autofluorescent proteins including blue fluorescent protein (BFP), may be introduced into a cell to encode a gene product which serves as a marker by which to measure the alteration or modification of expression of the gene product. In certain embodiments of the disclosure the gene product is luciferase. In a further embodiment of the disclosure the expression of the gene product is decreased.

[0677] Suitable protein tags provided herein include, but are not limited to, biotin carboxylase carrier protein (BCCP) tags, myc-tags, calmodulin-tags, FLAG-tags, hemagglutinin (HA)-tags, polyhistidine tags, also referred to as histidine tags or His-tags, maltose binding protein (MBP)-tags, nus-tags, glutathione-S-transferase (GST)-tags, green fluorescent protein (GFP)-tags, thioredoxin-tags, S-tags, Softags (e.g., Softag 1, Softag 3), strep-tags, biotin ligase tags, FlAsH tags, V5 tags, and SBP-tags. Additional suitable sequences will be apparent to those of skill in the art. In some embodiments, the fusion protein comprises one or more His tags.

[0678] In some embodiments of the present disclosure, the activity of the prime editing system may be temporally regulated by adjusting the residence time, the amount, and/or the activity of the expressed components of the PE system. For example, as described herein, the PE may be fused with a protein domain that is capable of modifying the intracellular half-life of the PE. In certain embodiments involving two or more vectors (e.g., a vector system in which the components described herein are encoded on two or more separate vectors), the activity of the PE system may be temporally regulated by controlling the timing in which the vectors are delivered. For example, in some embodiments a vector encoding the nuclease system may deliver the PE prior to the vector encoding the template. In other embodiments, the vector encoding the pegRNA may deliver the guide prior to the vector encoding the PE system. In some embodiments, the vectors encoding the PE system and pegRNA are delivered simultaneously. In certain embodiments, the simultaneously delivered vectors temporally deliver, e.g., the PE, pegRNA, and/or second strand guide RNA components. In further embodiments, the RNA (such as, e.g., the nuclease transcript) transcribed from the coding sequence on the vectors may further comprise at least one element that is capable of modifying the intracellular half-life of the RNA and/or modulating translational control. In some embodiments, the half-life of the RNA may be increased. In some embodiments, the half-life of the RNA may be decreased. In some embodiments, the element may be capable of increasing the stability of the RNA. In some embodiments, the element may be capable of decreasing the stability of the RNA. In some embodiments, the element may be within the 3′ UTR of the RNA. In some embodiments, the element may include a polyadenylation signal (PA). In some embodiments, the element may include a cap, e.g., an upstream mRNA or pegRNA end. In some embodiments, the RNA may comprise no PA such that it is subject to quicker degradation in the cell after transcription. In some embodiments, the element may include at least one AU-rich element (ARE). The AREs may be bound by ARE binding proteins (ARE-BPs) in a manner that is dependent upon tissue type, cell type, timing, cellular localization, and environment. In some embodiments the destabilizing element may promote RNA decay, affect RNA stability, or activate translation. In some embodiments, the ARE may comprise 50 to 150 nucleotides in length. In some embodiments, the ARE may comprise at least one copy of the sequence AUUUA. In some embodiments, at least one ARE may be added to the 3′ UTR of the RNA. In some embodiments, the element may be a Woodchuck Hepatitis Virus (WHP).

[0679] Posttranscriptional Regulatory Element (WPRE), which creates a tertiary structure to enhance expression from the transcript. In further embodiments, the element is a modified and/or truncated WPRE sequence that is capable of enhancing expression from the transcript, as described, for example in Zufferey et al., J Virol, 73(4): 2886-92 (1999) and Flajolet et al., J Virol, 72(7): 6175-80 (1998). In some embodiments, the WPRE or equivalent may be added to the 3′ UTR of the RNA. In some embodiments, the element may be selected from other RNA sequence motifs that are enriched in either fast- or slow-decaying transcripts.

[0680] In some embodiments, the vector encoding the PE or the pegRNA may be self-destroyed via cleavage of a target sequence present on the vector by the PE system. The cleavage may prevent continued transcription of a PE or a pegRNA from the vector. Although transcription may occur on the linearized vector for some amount of time, the expressed transcripts or proteins subject to intracellular degradation will have less time to produce off-target effects without continued supply from expression of the encoding vectors.

[6] Modified pegRNAs

[0681] The prime editing system described herein contemplates the use of any suitable pegRNAs, and in particular, pegRNAs which are modified to include one or more of the herein disclosed structural motifs which impart improved characteristics, such as increased stability and/or increased affinity for Cas9. The present inventors have surprisingly found that by appending certain nucleotide structural motifs to a pegRNA, e.g., to the terminus of the extension arm of a pegRNA, including but limited to, a prequeosin₁-1 riboswitch aptamer (“evopreQ₁-1”), a pseudoknot from the MMLV viral genome (“evopreQ₁-1”), and a modified tRNA used by MMLV RT as a primer for reverse transcription, a consistent increase in editing activity was achieved.

Canonical pegRNA Architecture

[0682] FIG. 3A shows one embodiment of a canonical pegRNA that may be modified and then use in the prime editing system disclosed herein. The canonical pegRNA (i.e., a pegRNA not including any of the modifications described here) comprises a traditional guide RNA (the green portion), which includes a ˜20 nt spacer sequence and a gRNA core region, and which binds with a napDNAbp. A canonical pegRNA also includes an extended RNA segment at the 5′ end, i.e., a 5′ extension, or at the 3′ end, i.e., a 3′ extension. The 5′extension includes a reverse transcription template sequence, a reverse transcription primer binding site, and an optional 5-20 nucleotide linker sequence. As shown in FIGS. 1A-1B, the RT primer binding site hybridizes to the free 3′ end that is formed after a nick is formed in the non-target strand of the R-loop, thereby priming reverse transcriptase for DNA polymerization in the 5′-3′ direction.

[0683] FIG. 3B shows another embodiment of a pegRNA usable in the prime editing system disclosed herein whereby a traditional guide RNA (the green portion) includes a ˜20 nt protospacer sequence and a gRNA core, which binds with the napDNAbp. In this embodiment, the guide RNA includes an extended RNA segment at the 3′ end, i.e., a 3′ extension. In this embodiment, the 3′extension includes a reverse transcription template sequence, and a reverse transcription primer binding site. As shown in FIGS. 1C-1D, the RT primer binding site hybridizes to the free 3′ end that is formed after a nick is formed in the non-target strand of the R-loop, thereby priming reverse transcriptase for DNA polymerization in the 5′-3′ direction.

[0684] FIG. 3C shows another embodiment of an pegRNA usable in the prime editing system disclosed herein whereby a traditional guide RNA (the green portion) includes a ˜20 nt protospacer sequence and a gRNA core, which binds with the napDNAbp. In this embodiment, the guide RNA includes an extended RNA segment at an intermolecular position within the gRNA core, i.e., an intramolecular extension. In this embodiment, the intramolecular extension includes a reverse transcription template sequence, and a reverse transcription primer binding site. The RT primer binding site hybridizes to the free 3′ end that is formed after a nick is formed in the non-target strand of the R-loop, thereby priming reverse transcriptase for DNA polymerization in the 5′-3′ direction.

[0685] Any of these canonical pegRNAs can be further modified to include one or more of the modifications described herein to increase the efficiency of prime editing.

[0686] In one embodiment, the position of the intermolecular RNA extension is not in the protospacer sequence of the guide RNA. In another embodiment, the position of the intermolecular RNA extension in the gRNA core. In still another embodiment, the position of the intermolecular RNA extension is any with the guide RNA molecule except within the protospacer sequence, or at a position which disrupts the protospacer sequence.

[0687] In one embodiment, the intermolecular RNA extension is inserted downstream from the 3′ end of the protospacer sequence. In another embodiment, the intermolecular RNA extension is inserted at least 1 nucleotide, at least 2 nucleotides, at least 3 nucleotides, at least 4 nucleotides, at least 5 nucleotides, at least 6 nucleotides, at least 7 nucleotides, at least 8 nucleotides, at least 9 nucleotides, at least 10 nucleotides, at least 11 nucleotides, at least 12 nucleotides, at least 13 nucleotides, at least 14 nucleotides, at least 15 nucleotides, at least 16 nucleotides, at least 17 nucleotides, at least 18 nucleotides, at least 19 nucleotides, at least 20 nucleotides, at least 21 nucleotides, at least 22 nucleotides, at least 23 nucleotides, at least 24 nucleotides, at least 25 nucleotides downstream of the 3′ end of the protospacer sequence.

[0688] In other embodiments, the intermolecular RNA extension is inserted into the gRNA, which refers to the portion of the guide RNA corresponding or comprising the tracrRNA, which binds and/or interacts with the Cas9 protein or equivalent thereof (i.e, a different napDNAbp). Preferably the insertion of the intermolecular RNA extension does not disrupt or minimally disrupts the interaction between the tracrRNA portion and the napDNAbp.

[0689] The length of the RNA extension (which includes at least the RT template and primer binding site) can be any useful length. In various embodiments, the RNA extension is at least 5 nucleotides, at least 6 nucleotides, at least 7 nucleotides, at least 8 nucleotides, at least 9 nucleotides, at least 10 nucleotides, at least 11 nucleotides, at least 12 nucleotides, at least 13 nucleotides, at least 14 nucleotides, at least 15 nucleotides, at least 16 nucleotides, at least 17 nucleotides, at least 18 nucleotides, at least 19 nucleotides, at least 20 nucleotides, at least 21 nucleotides, at least 22 nucleotides, at least 23 nucleotides, at least 24 nucleotides, at least 25 nucleotides, at least 30 nucleotides, at least 40 nucleotides, at least 50 nucleotides, at least 60 nucleotides, at least 70 nucleotides, at least 80 nucleotides, at least 90 nucleotides, at least 100 nucleotides, at least 200 nucleotides, at least 300 nucleotides, at least 400 nucleotides, or at least 500 nucleotides in length.

[0690] The RT template sequence can also be any suitable length. For example, the RT template sequence can be at least 3 nucleotides, at least 4 nucleotides, at least 5 nucleotides, at least 6 nucleotides, at least 7 nucleotides, at least 8 nucleotides, at least 9 nucleotides, at least 10 nucleotides, at least 11 nucleotides, at least 12 nucleotides, at least 13 nucleotides, at least 14 nucleotides, at least 15 nucleotides, at least 16 nucleotides, at least 17 nucleotides, at least 18 nucleotides, at least 19 nucleotides, at least 20 nucleotides, at least 30 nucleotides, at least 40 nucleotides, at least 50 nucleotides, at least 60 nucleotides, at least 70 nucleotides, at least 80 nucleotides, at least 90 nucleotides, at least 100 nucleotides, at least 200 nucleotides, at least 300 nucleotides, at least 400 nucleotides, or at least 500 nucleotides in length.

[0691] In still other embodiments, wherein the reverse transcription primer binding site sequence is at least 3 nucleotides, at least 4 nucleotides, at least 5 nucleotides, at least 6 nucleotides, at least 7 nucleotides, at least 8 nucleotides, at least 9 nucleotides, at least 10 nucleotides, at least 11 nucleotides, at least 12 nucleotides, at least 13 nucleotides, at least 14 nucleotides, at least 15 nucleotides, at least 16 nucleotides, at least 17 nucleotides, at least 18 nucleotides, at least 19 nucleotides, at least 20 nucleotides, at least 30 nucleotides, at least 40 nucleotides, at least 50 nucleotides, at least 60 nucleotides, at least 70 nucleotides, at least 80 nucleotides, at least 90 nucleotides, at least 100 nucleotides, at least 200 nucleotides, at least 300 nucleotides, at least 400 nucleotides, or at least 500 nucleotides in length.

[0692] In other embodiments, the optional linker or spacer sequence is at least 3 nucleotides, at least 4 nucleotides, at least 5 nucleotides, at least 6 nucleotides, at least 7 nucleotides, at least 8 nucleotides, at least 9 nucleotides, at least 10 nucleotides, at least 11 nucleotides, at least 12 nucleotides, at least 13 nucleotides, at least 14 nucleotides, at least 15 nucleotides, at least 16 nucleotides, at least 17 nucleotides, at least 18 nucleotides, at least 19 nucleotides, at least 20 nucleotides, at least 30 nucleotides, at least 40 nucleotides, at least 50 nucleotides, at least 60 nucleotides, at least 70 nucleotides, at least 80 nucleotides, at least 90 nucleotides, at least 100 nucleotides, at least 200 nucleotides, at least 300 nucleotides, at least 400 nucleotides, or at least 500 nucleotides in length.

[0693] The RT template sequence, in certain embodiments, encodes a single-stranded DNA molecule which is homologous to the non-target strand (and thus, complementary to the corresponding site of the target strand) but includes one or more nucleotide changes. The least one nucleotide change may include one or more single-base nucleotide changes, one or more deletions, and one or more insertions.

[0694] As depicted in FIG. 1G, the synthesized single-stranded DNA product of the RT template sequence is homologous to the non-target strand and contains one or more nucleotide changes. The single-stranded DNA product of the RT template sequence hybridizes in equilibrium with the complementary target strand sequence, thereby displacing the homologous endogenous target strand sequence. The displaced endogenous strand may be referred to in some embodiments as a 5′ endogenous DNA flap species (e.g., see FIG. 1E). This 5′ endogenous DNA flap species can be removed by a 5′ flap endonuclease (e.g., FEN1) and the single-stranded DNA product, now hybridized to the endogenous target strand, may be ligated, thereby creating a mismatch between the endogenous sequence and the newly synthesized strand. The mismatch may be resolved by the cell's innate DNA repair and/or replication processes.

[0695] In various embodiments, the nucleotide sequence of the RT template sequence corresponds to the nucleotide sequence of the non-target strand which becomes displaced as the 5′ flap species and which overlaps with the site to be edited.

[0696] In various embodiments of the pegRNAs, the reverse transcription template sequence may encode a single-strand DNA flap that is complementary to an endogenous DNA sequence adjacent to a nick site, wherein the single-strand DNA flap comprises a desired nucleotide change. The single-stranded DNA flap may displace an endogenous single-strand DNA at the nick site. The displaced endogenous single-strand DNA at the nick site can have a 5′ end and form an endogenous flap, which can be excised by the cell. In various embodiments, excision of the 5′ end endogenous flap can help drive product formation since removing the 5′ end endogenous flap encourages hybridization of the single-strand 3′ DNA flap to the corresponding complementary DNA strand, and the incorporation or assimilation of the desired nucleotide change carried by the single-strand 3′ DNA flap into the target DNA.

[0697] In various embodiments of the pegRNAs, the cellular repair of the single-strand DNA flap results in installation of the desired nucleotide change, thereby forming a desired product.

[0698] In still other embodiments, the desired nucleotide change is installed in an editing window that is between about −5 to +5 of the nick site, or between about −10 to +10 of the nick site, or between about −20 to +20 of the nick site, or between about −30 to +30 of the nick site, or between about −40 to +40 of the nick site, or between about −50 to +50 of the nick site, or between about −60 to +60 of the nick site, or between about −70 to +70 of the nick site, or between about −80 to +80 of the nick site, or between about −90 to +90 of the nick site, or between about −100 to +100 of the nick site, or between about −200 to +200 of the nick site.

[0699] In other embodiments, the desired nucleotide change is installed in an editing window that is between about +1 to +2 from the nick site, or about +1 to +3, +1 to +4, +1 to +5, +1 to +6, +1 to +7, +1 to +8, +1 to +9, +1 to +10, +1 to +11, +1 to +12, +1 to +13, +1 to +14, +1 to +15, +1 to +16, +1 to +17, +1 to +18, +1 to +19, +1 to +20, +1 to +21, +1 to +22, +1 to +23, +1 to +24, +1 to +25, +1 to +26, +1 to +27, +1 to +28, +1 to +29, +1 to +30, +1 to +31, +1 to +32, +1 to +33, +1 to +34, +1 to +35, +1 to +36, +1 to +37, +1 to +38, +1 to +39, +1 to +40, +1 to +41, +1 to +42, +1 to +43, +1 to +44, +1 to +45, +1 to +46, +1 to +47, +1 to +48, +1 to +49, +1 to +50, +1 to +51, +1 to +52, +1 to +53, +1 to +54, +1 to +55, +1 to +56, +1 to +57, +1 to +58, +1 to +59, +1 to +60, +1 to +61, +1 to +62, +1 to +63, +1 to +64, +1 to +65, +1 to +66, +1 to +67, +1 to +68, +1 to +69, +1 to +70, +1 to +71, +1 to +72, +1 to +73, +1 to +74, +1 to +75, +1 to +76, +1 to +77, +1 to +78, +1 to +79, +1 to +80, +1 to +81, +1 to +82, +1 to +83, +1 to +84, +1 to +85, +1 to +86, +1 to +87, +1 to +88, +1 to +89, +1 to +90, +1 to +90, +1 to +91, +1 to +92, +1 to +93, +1 to +94, +1 to +95, +1 to +96, +1 to +97, +1 to +98, +1 to +99, +1 to +100, +1 to +101, +1 to +102, +1 to +103, +1 to +104, +1 to +105, +1 to +106, +1 to +107, +1 to +108, +1 to +109, +1 to +110, +1 to +111, +1 to +112, +1 to +113, +1 to +114, +1 to +115, +1 to +116, +1 to +117, +1 to +118, +1 to +119, +1 to +120, +1 to +121, +1 to +122, +1 to +123, +1 to +124, or +1 to +125 from the nick site.

[0700] In still other embodiments, the desired nucleotide change is installed in an editing window that is between about +1 to +2 from the nick site, or about +1 to +5, +1 to +10, +1 to +15, +1 to +20, +1 to +25, +1 to +30, +1 to +35, +1 to +40, +1 to +45, +1 to +50, +1 to +55, +1 to +100, +1 to +105, +1 to +110, +1 to +115, +1 to +120, +1 to +125, +1 to +130, +1 to +135, +1 to +140, +1 to +145, +1 to +150, +1 to +155, +1 to +160, +1 to +165, +1 to +170, +1 to +175, +1 to +180, +1 to +185, +1 to +190, +1 to +195, or +1 to +200, from the nick site.

[0701] In various aspects, the pegRNAs are modified versions of a guide RNA. Guide RNAs may be expressed from an encoding nucleic acid, or synthesized chemically. Methods are well known in the art for obtaining or otherwise synthesizing guide RNAs and for determining the appropriate sequence of the guide RNA, including the protospacer sequence which interacts and hybridizes with the target strand of a genomic target site of interest.

[0702] In various embodiments, the particular design aspects of a guide RNA sequence will depend upon the nucleotide sequence of a genomic target site of interest (i.e., the desired site to be edited) and the type of napDNAbp (e.g., Cas9 protein) present in prime editing systems described herein, among other factors, such as PAM sequence locations, percent G/C content in the target sequence, the degree of microhomology regions, secondary structures, etc.

[0703] In general, a guide sequence is any polynucleotide sequence having sufficient complementarity with a target polynucleotide sequence to hybridize with the target sequence and direct sequence-specific binding of a napDNAbp (e.g., a Cas9, Cas9 homolog, or Cas9 variant) to the target sequence. In some embodiments, the degree of complementarity between a guide sequence and its corresponding target sequence, when optimally aligned using a suitable alignment algorithm, is about or more than about 50%, 60%, 75%, 80%, 85%, 90%, 95%, 97.5%, 99%, or more. Optimal alignment may be determined with the use of any suitable algorithm for aligning sequences, non-limiting example of which include the Smith-Waterman algorithm, the Needleman-Wunsch algorithm, algorithms based on the Burrows-Wheeler Transform (e.g., the Burrows Wheeler Aligner), ClustalW, Clustal X, BLAT, Novoalign (Novocraft Technologies, ELAND (Illumina, San Diego, Calif.), SOAP (available at soap.genomics.org.cn), and Maq (available at maq.sourceforge.net). In some embodiments, a guide sequence is about or more than about 5, 10, 11, 12, 13, 14, 15, 16, 17, 18, 19, 20, 21, 22, 23, 24, 25, 26, 27, 28, 29, 30, 35, 40, 45, 50, 75, or more nucleotides in length.

[0704] In some embodiments, a guide sequence is less than about 75, 50, 45, 40, 35, 30, 25, 20, 15, 12, or fewer nucleotides in length. The ability of a guide sequence to direct sequence-specific binding of a prime editor (PE) to a target sequence may be assessed by any suitable assay. For example, the components of a prime editor (PE), including the guide sequence to be tested, may be provided to a host cell having the corresponding target sequence, such as by transfection with vectors encoding the components of a prime editor (PE) disclosed herein, followed by an assessment of preferential cleavage within the target sequence, such as by Surveyor assay as described herein. Similarly, cleavage of a target polynucleotide sequence may be evaluated in a test tube by providing the target sequence, components of a prime editor (PE), including the guide sequence to be tested and a control guide sequence different from the test guide sequence, and comparing binding or rate of cleavage at the target sequence between the test and control guide sequence reactions. Other assays are possible, and will occur to those skilled in the art.

[0705] A guide sequence may be selected to target any target sequence. In some embodiments, the target sequence is a sequence within a genome of a cell. Exemplary target sequences include those that are unique in the target genome. For example, for the S. pyogenes Cas9, a unique target sequence in a genome may include a Cas9 target site of the form MMMMMMMMNNNNNNNNNNNNXGG (SEQ ID NO: 176) where NNNNNNNNNNNNXGG (SEQ ID NO: 177) (N is A, G, T, or C; and X can be anything). A unique target sequence in a genome may include an S. pyogenes Cas9 target site of the form MMMMMMMMMNNNNNNNNNNNXGG (SEQ ID NO: 178) where NNNNNNNNNNNXGG (SEQ ID NO: 179) (N is A, G, T, or C; and X can be anything). For the S. thermophilus CRISPR1Cas9, a unique target sequence in a genome may include a Cas9 target site of the form MMMMMMMMNNNNNNNNNNNNXXAGAAW (SEQ ID NO: 180) where NNNNNNNNNNNNXXAGAAW (SEQ ID NO: 181) (N is A, G, T, or C; X can be anything; and W is A or T). A unique target sequence in a genome may include an S. thermophilus CRISPR 1 Cas9 target site of the form MMMMMMMMMNNNNNNNNNNNXXAGAAW (SEQ ID NO: 182) where NNNNNNNNNNNXXAGAAW (SEQ ID NO: 183) (N is A, G, T, or C; X can be anything; and W is A or T). For the S. pyogenes Cas9, a unique target sequence in a genome may include a Cas9 target site of the form MMMMMMMMNNNNNNNNNNNNXGGXG (SEQ ID NO: 184) where NNNNNNNNNNNNXGGXG (SEQ ID NO: 185) (N is A, G, T, or C; and X can be anything). A unique target sequence in a genome may include an S. pyogenes Cas9 target site of the form MMMMMMMMMNNNNNNNNNNNXGGXG (SEQ ID NO: 186) where NNNNNNNNNNNXGGXG (SEQ ID NO: 187) (N is A, G, T, or C; and X can be anything). In each of these sequences “M” may be A, G, T, or C, and need not be considered in identifying a sequence as unique.

[0706] In some embodiments, a guide sequence is selected to reduce the degree of secondary structure within the guide sequence. Secondary structure may be determined by any suitable polynucleotide folding algorithm. Some programs are based on calculating the minimal Gibbs free energy. An example of one such algorithm is mFold, as described by Zuker and Stiegler (Nucleic Acids Res. 9 (1981), 133-148). Another example folding algorithm is the online webserver RNAfold, developed at Institute for Theoretical Chemistry at the University of Vienna, using the centroid structure prediction algorithm (see e.g. A. R. Gruber et al., 2008, Cell 106(1): 23-24; and PA Carr and GM Church, 2009, Nature Biotechnology 27(12): 1151-62). Further algorithms may be found in U.S. application Ser. No. 61/836,080; Broad Reference BI-2013/004A); incorporated herein by reference.

[0707] In general, a tracr mate sequence includes any sequence that has sufficient complementarity with a tracr sequence to promote one or more of: (1) excision of a guide sequence flanked by tracr mate sequences in a cell containing the corresponding tracr sequence; and (2) formation of a complex at a target sequence, wherein the complex comprises the tracr mate sequence hybridized to the tracr sequence. In general, degree of complementarity is with reference to the optimal alignment of the tracr mate sequence and tracr sequence, along the length of the shorter of the two sequences. Optimal alignment may be determined by any suitable alignment algorithm, and may further account for secondary structures, such as self-complementarity within either the tracr sequence or tracr mate sequence. In some embodiments, the degree of complementarity between the tracr sequence and tracr mate sequence along the length of the shorter of the two when optimally aligned is about or more than about 25%, 30%, 40%, 50%, 60%, 70%, 80%, 90%, 95%, 97.5%, 99%, or higher. In some embodiments, the tracr sequence is about or more than about 5, 6, 7, 8, 9, 10, 11, 12, 13, 14, 15, 16, 17, 18, 19, 20, 25, 30, 40, 50, or more nucleotides in length. In some embodiments, the tracr sequence and tracr mate sequence are contained within a single transcript, such that hybridization between the two produces a transcript having a secondary structure, such as a hairpin. Preferred loop forming sequences for use in hairpin structures are four nucleotides in length, and most preferably have the sequence GAAA. However, longer or shorter loop sequences may be used, as may alternative sequences. The sequences preferably include a nucleotide triplet (for example, AAA), and an additional nucleotide (for example C or G). Examples of loop forming sequences include CAAA and AAAG. In an embodiment of the invention, the transcript or transcribed polynucleotide sequence has at least two or more hairpins. In preferred embodiments, the transcript has two, three, four or five hairpins. In a further embodiment of the invention, the transcript has at most five hairpins. In some embodiments, the single transcript further includes a transcription termination sequence; preferably this is a polyT sequence, for example six T nucleotides. Further non-limiting examples of single polynucleotides comprising a guide sequence, a tracr mate sequence, and a tracr sequence are as follows (listed 5′ to 3′), where “N” represents a base of a guide sequence, the first block of lower case letters represent the tracr mate sequence, and the second block of lower case letters represent the tracr sequence, and the final poly-T sequence represents the transcription terminator:

(1)
(SEQ ID NO: 188)
NNNNNNNNGTTTTTGTACTCTCAAGATTTAGAAATAAATCTTGCAGAAGC
TACAAAGATAAGGCTTCATGCCGAAATCAACACCCTGTCATTTTATGGCA
GGGTGTTTTCGTTATTTAATTTTTT;
(2)
(SEQ ID NO: 189)
NNNNNNNNNNNNNNNNNNGTTTTTGTACTCTCAGAAATGCAGAAGCTACA
AAGATAAGGCTTCATGCCGAAATCAACACCCTGTCATTTTATGGCAGGGT
GTTTTCGTTATTTAATTTTTT;
(3)
(SEQ ID NO: 190)
NNNNNNNNNNNNNNNNNNNNGTTTTTGTACTCTCAGAAATGCAGAAGCTA
CAAAGATAAGGCTTCATGCCGAAATCAACACCCTGTCATTTTATGGCAGG
GTGTTTTTT;
(4)
(SEQ ID NO: 191)
NNNNNNNNNNNNNNNNNNNNGTTTTAGAGCTAGAAATAGCAAGTTAAAAT
AAGGCTAGTCCGTTATCAACTTGAAAAAGTGGCACCGAGTCGGTGCTTTT
TT;
(5)
(SEQ ID NO: 192)
NNNNNNNNNNNNNNNNNNNNGTTTTAGAGCTAGAAATAGCAAGTTAAAAT
AAGGCTAGTCCGTTATCAACTTGAAAAAGTGTTTTTTT;
AND
(6)
(SEQ ID NO: 193)
NNNNNNNNNNNNNNNNNNNNGTTTTAGAGCTAGAAATAGCAAGTTAAAAT
AAGGCTAGTCCGTTATCATTTTTTTT.

[0708] In some embodiments, sequences (1) to (3) are used in combination with Cas9 from S. thermophilus CRISPR1. In some embodiments, sequences (4) to (6) are used in combination with Cas9 from S. pyogenes. In some embodiments, the tracr sequence is a separate transcript from a transcript comprising the tracr mate sequence.

[0709] It will be apparent to those of skill in the art that in order to target any of the fusion proteins comprising a Cas9 domain and a single-stranded DNA binding protein, as disclosed herein, to a target site, e.g., a site comprising a point mutation to be edited, it is typically necessary to co-express the fusion protein together with a guide RNA, e.g., an sgRNA. As explained in more detail elsewhere herein, a guide RNA typically comprises a tracrRNA framework allowing for Cas9 binding, and a guide sequence, which confers sequence specificity to the Cas9:nucleic acid editing enzyme/domain fusion protein.

[0710] In some embodiments, the guide RNA comprises a structure 5′-[guide sequence]-GUUUUAGAGCUAGAAAUAGCAAGUUAAAAUAAAGGCUAGUCCGUUAUCAACU UGAAAAAGUGGCACCGAGUCGGUGCUUUUU-3′ (SEQ ID NO: 194), wherein the guide sequence comprises a sequence that is complementary to the target sequence. The guide sequence is typically 20 nucleotides long. The sequences of suitable guide RNAs for targeting Cas9:nucleic acid editing enzyme/domain fusion proteins to specific genomic target sites will be apparent to those of skill in the art based on the instant disclosure. Such suitable guide RNA sequences typically comprise guide sequences that are complementary to a nucleic sequence within 50 nucleotides upstream or downstream of the target nucleotide to be edited. Some exemplary guide RNA sequences suitable for targeting any of the provided fusion proteins to specific target sequences are provided herein. Additional guide sequences are well known in the art and can be used with the prime editor (PE) described herein.

[0711] In other embodiments, the pegRNAs include those depicted in FIG. 3D.

[0712] In still other embodiments, the pegRNAs may include those depicted in FIG. 3E.

[0713] FIG. 3D provides the structure of an embodiment of a pegRNA contemplated herein and which may be designed in accordance with the methodology defined in Example 2. The pegRNA comprises three main component elements ordered in the 5′ to 3′ direction, namely: a spacer, a gRNA core, and an extension arm at the 3′ end. The extension arm may further be divided into the following structural elements in the 5′ to 3′ direction, namely: an optional homology arm, a DNA synthesis template, and a primer binding site (PBS). In addition, the pegRNA may comprise an optional 3′ end modifier region (e1) and an optional 5′ end modifier region (e2). Still further, the pegRNA may comprise a transcriptional termination signal at the 3′ end of the pegRNA (not depicted). These structural elements are further defined herein. The depiction of the structure of the pegRNA is not meant to be limiting and embraces variations in the arrangement of the elements. For example, the optional sequence modifiers (e1) and (e2) could be positioned within or between any of the other regions shown, and not limited to being located at the 3′ and 5′ ends.

[0714] FIG. 3E provides the structure of another embodiment of a pegRNA contemplated herein and which may be designed in accordance with the methodology defined in Example 2. The pegRNA comprises three main component elements ordered in the 5′ to 3′ direction, namely: a spacer, a gRNA core, and an extension arm at the 3′ end. The extension arm may further be divided into the following structural elements in the 5′ to 3′ direction, namely: an optional homology arm, a DNA synthesis template, and a primer binding site (PBS). In addition, the pegRNA may comprise an optional 3′ end modifier region (e1) and an optional 5′ end modifier region (e2). Still further, the pegRNA may comprise a transcriptional termination signal on the 3′ end of the pegRNA (not depicted). These structural elements are further defined herein. The depiction of the structure of the pegRNA is not meant to be limiting and embraces variations in the arrangement of the elements. For example, the optional sequence modifiers (e1) and (e2) could be positioned within or between any of the other regions shown, and not limited to being located at the 3′ and 5′ ends.

[0715] In some embodiments, the PEgRNA or nicking guide RNA described herein comprises a chemically modified nucleobase or nucleobase analog. In some embodiments, the PEgRNA or nicking guide RNA comprises a modified bases (e.g., methylated bases), intercalated bases, modified sugars (e.g., 2′-fluororibose, ribose, 2′-deoxyribose, 2′-O-methylcytidine, arabinose, and hexose), or modified phosphate groups (e.g., phosphorothioates and 5′ N phosphoramidite linkages). In some embodiments, the PEgRNA comprises a 2′-O-methyl modification. In some embodiments, the PEgRNA comprises a phosphorothioate linkages between the first and last three nucleotides of the RNA.

[0716] In some embodiments, the PEgRNA or nicking guide RNA described herein comprises a chemical modification comprising a nebularine or a deoxynebularine. In some embodiments, the PEgRNA or nicking guide RNA comprises a chemical modification comprising a phosphorothioate linkage. In some embodiments, the PEgRNA or nicking guide RNA comprises a phosphorothioate linkage at a 5′ end or at a 3′ end. In some embodiments, the PEgRNA or nicking guide RNA comprises two and no more than two contiguous phosphorothioate linkages at the 5′ end or at the 3′ end. In some embodiments, the PEgRNA or nicking guide RNA comprises three contiguous phosphorothioate linkages at the 5′ end or at the 3′ end. In some embodiments, the PEgRNA or nicking guide RNA comprises the sequence 5′-UsUsU-3′ at the 3′end or at the 5′ end, wherein U indicates a uridine and wherein s indicates a phosphorothioate linkage. In some embodiments, the nucleobase may be chemically modified. Examples of chemical modifications to the nucleobase include, but are not limited to, 2-thiouridine, 4-thiouridine, N6-methyladenosine, pseudouridine, 2,6-diaminopurine, inosine, thymidine, 5-methylcytosine, 5-substituted pyrimidine, isoguanine, isocytosine, or halogenated aromatic groups.

[0717] Non-limiting examples of modifications may include 2′-O-methyl (2′-O-Me), 2′-O-(2-methoxyethyl) (2′-O-MOE), 2′-fluoro (2′-F), phosphorothioate (PS) bond between nucleotides, G-C substitutions, and inverted abasic linkages between nucleotides and equivalents thereof. In some embodiments, the PEgRNA comprises a chemical modification selected from dihydrouridine, inosine, 7-methylguanosine, 5-methylcytidine (5mC), 5′ Phosphate ribothymidine, 2′-O-methyl ribothymidine, 2′-O-ethyl ribothymidine, 2′-fluoro ribothymidine, C-5 propynyl-deoxycytidine (pdC), C-5 propynyl-deoxyuridine (pdU), C-5 propynyl-uridine (pU), 5-methyl cytidine, 5-methyl uridine, 5-methyl deoxycytidine, 5-methyl deoxyuridine methoxy, 2,6-diaminopurine, 5′-Dimethoxytrityl-N4-ethyl-2′-deoxycytidine, C-5 propynyl-f-cytidine (pfC), C-5 propynyl-f-uridine (pfU), 5-methyl f-cytidine, 5-methyl f-uridine, C-5 propynyl-m-cytidine (pmC), 5-methyl m-cytidine, 5-methyl m-uridine, MGB (minor groove binder) pseudouridine (Ψ), 1-N-methylpseudouridine (1-Me-Ψ), 5-methoxyuridine (5-MO-U) 2′-O-methyl modifications, 2′-O-(2-methoxyethyl) modifications, 2′-fluoro modifications, phosphorothioate modifications, inverted abasic modifications, deoxyribonucleotides, bicylic ribose analog (e.g., locked nucleic acid (LNA), C-ethylene-bridged nucleic acid (ENA), bridged nucleic acid (BNA), unlocked nucleic acid (UNA)), base or nucleobase modifications, internucleoside linkage modifications, ribonebularine, 2′-O-methylnebularine, or 2′-deoxynebularine. Other examples of modifications include, but are not limited to, 5′adenylate, 5′ guanosine-triphosphate cap, 5′N7-Methylguanosine-triphosphate cap, 5′triphosphate cap, 3′phosphate, 3′thiophosphate, 5′phosphate, 5′thiophosphate, Cis-Syn thymidine dimer, trimers, abasic, acridine, azobenzene, biotin, biotin BB, biotin TEG, cholesteryl TEG, desthiobiotin, TEG, DNP TEG, DNP-X, DOTA, dT-Biotin, dual biotin, PC biotin, psoralen C2, psoralen C6, TINA, 3′DABCYL, black hole quencher 1, black hole quencer 2, DABCYL SE, dT-DABCYL, IRDye QC-1, QSY-21, QSY-35, QSY-7, QSY-9, carboxyl linker, thiol linkers, 2′deoxyribonucleoside analog purine, 2′deoxyribonucleoside analog pyrimidine, ribonucleoside analog, 2′-O-methyl ribonucleoside analog, sugar modified analogs, wobble/universal bases, fluorescent dye label, 2′fluoro RNA, 2′O-methyl RNA, methylphosphonate, phosphodiester DNA, phosphodiester RNA, phosphothioate DNA, phosphorothioate RNA, UNA, pseudouridine-5′-triphosphate, 5-methylcytidine-5′-triphosphate, 2-O-methyl-3-phosphorothioate or any combinations thereof.

[0718] In some embodiments, the PEgRNAs and/or nicking guide RNAs provided in this disclosure may have undergone modifications, e.g., chemical modifications or biological modifications. Modifications may be made at any position within a PEgRNA or nicking guide RNA, and may include one or more modifications to a nucleobase, a ribose component, a phosphate backbone, or any combinations thereof. In some embodiments, a modification can be a structure guided modification. In some embodiments, a modification is at the 5′ end and/or the 3′ end of a PEgRNA. In some embodiments, a chemical modification is at the 5′ end and/or the 3′ end of a nicking guide RNA. In some embodiments, a modification may be within the spacer sequence, the extension arm, the DNA synthesis template, and/or the primer binding site of a PEgRNA. In some embodiments, a modification may be within the spacer sequence or the gRNA core of a PEgRNA or a nicking guide RNA. In some embodiments, a modification may be within the 3′ most end of a PEgRNA or nicking guide RNA. In some embodiments, a modification may be within the 5′ most end of a PEgRNA or nicking guide RNA. In some embodiments, a PEgRNA or nicking guide RNA comprises 1, 2, 3, 4, 5, 6, 7, 8, 9, 10 or more modified nucleotides at the 3′ end. In some embodiments, a PEgRNA or nicking guide RNA comprises 1, 2, 3, 4, 5, 6, 7, 8, 9, 10 or more modified nucleotides at the 5′ end. In some embodiments, a PEgRNA or nicking guide RNA comprises 1, 2, 3, 4, or 5 or more modified nucleotides at the 3′ end. In some embodiments, a PEgRNA or nicking guide RNA comprises 1, 2, 3, 4, or 5 more modified nucleotides at the 5′ end. In some embodiments, a PEgRNA or nicking guide RNA comprises 1, 2, or 3 or more modified nucleotides at the 3′ end. In some embodiments, a PEgRNA or nicking guide RNA comprises 1, 2, or 3 more modified nucleotides at the 5′ end. In some embodiments, a PEgRNA or nicking guide RNA comprises 1, 2, 3, 4, 5, 6, 7, 8, 9, 10 or more contiguous modified nucleotides at the 3′ end. In some embodiments, a PEgRNA or nicking guide RNA comprises 1, 2, 3, 4, 5, 6, 7, 8, 9, 10 or more contiguous modified nucleotides at the 5′ end. In some embodiments, a PEgRNA or nicking guide RNA comprises 1, 2, 3, 4, or 5 contiguous modified nucleotides at the 3′ end. In some embodiments, a PEgRNA or nicking guide RNA comprises 1, 2, 3, 4, or 5 contiguous modified nucleotides at the 5′ end. In some embodiments, a PEgRNA or nicking guide RNA comprises 1, 2, or 3 contiguous modified nucleotides at the 3′ end. In some embodiments, a PEgRNA or nicking guide RNA comprises 1, 2, or 3 contiguous modified nucleotides at the 5′ end. In some embodiments, a PEgRNA or nicking guide RNA comprises 3 contiguous modified nucleotides at the 3′ end. In some embodiments, a PEgRNA or nicking guide RNA comprises 1, 2, 3, 4, 5, or more modified nucleotides near the 3′ end. In some embodiments, a PEgRNA or nicking guide RNA comprises 3 contiguous modified nucleotides at the 3′ end. In some embodiments, a PEgRNA or nicking guide RNA comprises 3 contiguous modified nucleotides at the 5′ end. In some embodiments, a PEgRNA or nicking guide RNA comprises 1, 2, 3, 4, 5, or more modified nucleotides near the 3′ end. In some embodiments, a PEgRNA or nicking guide RNA comprises 1, 2, 3, 4, 5, or more contiguous modified nucleotides near the 3′ end.

pegRNA Design Method

[0719] The present disclosure also relates to methods for designing pegRNAs.

[0720] In one aspect of design, the design approach can take into account the particular application for which prime editing is being used. For instance, and as exemplified and discussed herein, prime editing can be used, without limitation, to (a) install mutation-correcting changes to a nucleotide sequence, (b) install protein and RNA tags, (c) install immunoepitopes on proteins of interest, (d) install inducible dimerization domains in proteins, (e) install or remove sequences to alter that activity of a biomolecule, (f) install recombinase target sites to direct specific genetic changes, and (g) mutagenesis of a target sequence by using an error-prone RT. In addition to these methods which, in general, insert, change, or delete nucleotide sequences at target sites of interest, prime editors can also be used to construct highly programmable libraries, as well as to conduct cell data recording and lineage tracing studies. In these various uses, there may be as described herein particular design aspects pertaining to the preparation of a pegRNA that is particularly useful for any given of these applications.

[0721] When designing a pegRNA for any particular application or use of prime editing, a number of considerations may be taken into account, which include, but are not limited to:
[0722] (a) the target sequence, i.e., the nucleotide sequence in which one or more nucleobase modifications are desired to be installed by the prime editor;
[0723] (b) the location of the cut site within the target sequence, i.e., the specific nucleobase position at which the prime editor will induce a single-stand nick to create a 3′ end RT primer sequence on one side of the nick and the 5′ end endogenous flap on the other side of the nick (which ultimately is removed by FEN1 or equivalent thereto and replaced by the 3′ ssDNA flap. The cut site is analogous to the “edit location” since this what creates the 3′ end RT primer sequence which becomes extended by the RT during RNA-depending DNA polymerization to create the 3′ ssDNA flap containing the desired edit, which then replaces the 5′ endogenous DNA flap in the target sequence.
[0724] (c) the available PAM sequences (including the canonical SpCas9 PAM sites, as well as non-canonical PAM sites recognized by Cas9 variants and equivalents with expanded or differing PAM specificities);
[0725] (d) the spacing between the available PAM sequences and the location of the cut site in the target sequence;
[0726] (e) the particular Cas9, Cas9 variant, or Cas9 equivalent of the prime editor being used;
[0727] (f) the sequence and length of the primer binding site;
[0728] (g) the sequence and length of the edit template;
[0729] (h) the sequence and length of the homology arm;
[0730] (i) the spacer sequence and length; and
[0731] (j) the core sequence.

[0732] The instant disclosure discusses these aspects above.

[0733] In one embodiment, an approach to designing a suitable pegRNA, and optionally a nicking-sgRNA design guide for second-site nicking, is hereby provided. This embodiment provides a step-by-step set of instructions for designing pegRNAs and nicking-sgRNAs for prime editing which takes into account one or more of the above considerations. The steps reference the examples shown in FIGS. 70A-70I.
[0734] 1. Define the target sequence and the edit. Retrieve the sequence of the target DNA region (˜200 bp) centered around the location of the desired edit (point mutation, insertion, deletion, or combination thereof). See FIG. 70A.
[0735] 2. Locate target PAMs. Identify PAMs in the proximity to the desired edit location. PAMs can be identified on either strand of DNA proximal to the desired edit location. While PAMs close to the edit position are preferred (i.e., wherein the nick site is less than 30 nt from the edit position, or less than 29 nt, 28 nt, 27 nt, 26 nt, 25 nt, 24 nt, 23 nt, 22 nt, 21 nt, 20 nt, 19 nt, 18 nt, 17 nt, 16 nt, 15 nt, 14 nt, 13 nt, 12 nt, 11 nt, 10 nt, 9 nt, 8 nt, 7 nt, 6 nt, 5 nt, 4 nt, 3 nt, or 2 nt from the edit position to the nick site), it is possible to install edits using protospacers and PAMs that place the nick ≥30 nt from the edit position. See FIG. 70B.
[0736] 3. Locate the nick sites. For each PAM being considered, identify the corresponding nick site and on which strand. For Sp Cas9 H840A nickase, cleavage occurs in the PAM-containing strand between the 3^{rd} and 4^{th} bases 5′ to the NGG PAM. All edited nucleotides must exist 3′ of the nick site, so appropriate PAMs must place the nick 5′ to the target edit on the PAM-containing strand. In the example shown below, there are two possible PAMs. For simplicity, the remaining steps will demonstrate the design of a pegRNA using PAM 1 only. See FIG. 70C.
[0737] 4. Design the spacer sequence. The protospacer of Sp Cas9 corresponds to the 20 nucleotides 5′ to the NGG PAM on the PAM-containing strand. Efficient Pol III transcription initiation requires a G to be the first transcribed nucleotide. If the first nucleotide of the protospacer is a G, the spacer sequence for the pegRNA is simply the protospacer sequence. If the first nucleotide of the protospacer is not a G, the spacer sequence of the pegRNA is G followed by the protospacer sequence. See FIG. 70D.
[0738] 5. Design a primer binding site (PBS). Using the starting allele sequence, identify the DNA primer on the PAM-containing strand. The 3′ end of the DNA primer is the nucleotide just upstream of the nick site (i.e. the 4^{th} base 5′ to the NGG PAM for Sp Cas9). As a general design principle for use with PE2 and PE3, a pegRNA primer binding site (PBS) containing 12 to 13 nucleotides of complementarity to the DNA primer can be used for sequences that contain ˜40-60% GC content. For sequences with low GC content, longer (14- to 15-nt) PBSs should be tested. For sequences with higher GC content, shorter (8- to 11-nt) PBSs should be tested. Optimal PBS sequences should be determined empirically, regardless of GC content. To design a length-p PBS sequence, take the reverse complement of the first p nucleotides 5′ of the nick site in the PAM-containing strand using the starting allele sequence. See FIG. 70E.
[0739] 6. Design an RT template (or DNA synthesis template). The RT template (or DNA synthesis template where the polymerase is not reverse transcriptase) encodes the designed edit and homology to the sequence adjacent to the edit. In one embodiment, these regions correspond to the DNA synthesis template of FIG. 3D and FIG. 3E, wherein the DNA synthesis template comprises the “edit template” and the “homology arm.” Optimal RT template lengths vary based on the target site. For short-range edits (positions +1 to +6), it is recommended to test a short (9 to 12 nt), a medium (13 to 16 nt), and a long (17 to 20 nt) RT template. For long-range edits (positions +7 and beyond), it is recommended to use RT templates that extend at least 5 nt (preferably 10 or more nt) past the position of the edit to allow for sufficient 3′ DNA flap homology. For long-range edits, several RT templates should be screened to identify functional designs. For larger insertions and deletions (≥5 nt), incorporation of greater 3′ homology (˜20 nt or more) into the RT template is recommended. Editing efficiency is typically impaired when the RT template encodes the synthesis of a G as the last nucleotide in the reverse transcribed DNA product (corresponding to a C in the RT template of the pegRNA). As many RT templates support efficient prime editing, avoidance of G as the final synthesized nucleotide is recommended when designing RT templates. To design a length-r RT template sequence, use the desired allele sequence and take the reverse complement of the first r nucleotides 3′ of the nick site in the strand that originally contained the PAM. Note that compared to SNP edits, insertion or deletion edits using RT templates of the same length will not contain identical homology. See FIG. 70F.
[0740] 7. Assemble the full pegRNA sequence. Concatenate the pegRNA components in the following order (5′ to 3′): spacer, scaffold, RT template and PBS. See FIG. 70G.
[0741] 8. Designing nicking-sgRNAs for PE3. Identify PAMs on the non-edited strand upstream and downstream of the edit. Optimal nicking positions are highly locus-dependent and should be determined empirically. In general, nicks placed 40 to 90 nucleotides 5′ to the position across from the pegRNA-induced nick lead to higher editing yields and fewer indels. A nicking sgRNA has a spacer sequence that matches the 20-nt protospacer in the starting allele, with the addition of a 5′-G if the protospacer does not begin with a G. See FIG. 70H.
[0742] 9. Designing PE3b nicking-sgRNAs. If a PAM exists in the complementary strand and its corresponding protospacer overlaps with the sequence targeted for editing, this edit could be a candidate for the PE3b system. In the PE3b system, the spacer sequence of the nicking-sgRNA matches the sequence of the desired edited allele, but not the starting allele. The PE3b system operates efficiently when the edited nucleotide(s) falls within the seed region (˜10 nt adjacent to the PAM) of the nicking-sgRNA protospacer. This prevents nicking of the complementary strand until after installation of the edited strand, preventing competition between the pegRNA and the sgRNA for binding the target DNA. PE3b also avoids the generation of simultaneous nicks on both strands, thus reducing indel formation significantly while maintaining high editing efficiency. PE3b sgRNAs should have a spacer sequence that matches the 20-nt protospacer in the desired allele, with the addition of a 5′ G if needed. See FIG. 70I.

[0743] The above step-by-step process for designing a suitable pegRNA and a second-site nicking sgRNA is not meant to be limiting in any way. The disclosure contemplates variations of the above-described step-by-step process which would be derivable therefrom by a person of ordinary skill in the art. pegRNA modifications

[0744] The present disclosure provides next-generation modified pegRNAs with improved properties, including but not limited to, increased stability and cellular lifespan, and improved binding affinity for a napDNAbp. These modified pegRNAs result in improved genome editing as demonstrated by increase editing efficiency at a wide variety of genomic sites. The present inventors have surprisingly found that by appending certain nucleic acid structural motifs to terminus of the extension arm of a pegRNA, including but limited to, a prequeosin₁-1 riboswitch aptamer (“evopreQ₁-1”) or variant thereof, a pseudoknot from the MMLV viral genome (“evopreQ₁-1”) or variant thereof, a modified tRNA used by MMLV RT as a primer for reverse transcription or variant thereof, and a G quadruplex or variant thereof, a consistent increase in editing activity was achieved.

[0745] In one embodiment, the modified pegRNAs include a nucleic acid moiety at the 3′ end of the pegRNA in accordance with FIG. 98. Optionally, the 3′ end of the pegRNA is fused to the nucleic acid moiety through a nucleotide linker. In various embodiments, it will be appreciated that a wide variety of nucleotide sequences will work reasonably well for each genomic target site. Linker length can also be variable. In some cases, linkers ranging in length from 3-18 nucleotides will work. In other cases, the linker may be at least 3 nucleotides, at least 4 nucleotides, at least 5 nucleotides, at least 6 nucleotides, at least 7 nucleotides, at least 8 nucleotides, at least 9 nucleotides, at least 10 nucleotides, at least 11 nucleotides, at least 12 nucleotides, at least 13 nucleotides, at least 14 nucleotides, at least 15 nucleotides, at least 16 nucleotides, at least 17 nucleotides, at least 18 nucleotides, at least 19 nucleotides, at least 20 nucleotides, at least 21 nucleotides, at least 22 nucleotides, at least 23 nucleotides, at least 24 nucleotides, at least 25 nucleotides, at least 26 nucleotides, at least 27 nucleotides, at least 28 nucleotides, at least 29 nucleotides, or at least 30 nucleotides.

[0746] In general, the nucleic acid moieties that may be used to modify a pegRNA, for example, by attaching it to the 3′ end of a pegRNA, may include any nucleic acid moiety, including, for instance, a nucleic acid molecule comprising or which forms a double-helix moiety, toeloop moiety, hairpin moiety, stem-loop moiety, pseudoknot moiety, aptamer moiety, G quadraplex moiety, tRNA moiety, or a ribozyme moiety. The nucleic acid moiety may be characterized as forming a secondary nucleic acid structure, a tertiary nucleic acid structure, or a quadruple nucleic acid structure. In other words, the nucleic acid moiety may form any two dimensional or three dimensional structure known to be formed by such structures. The nucleic acid moiety may be DNA or RNA.

[0747] Without restriction, the following are specific examples of nucleotide motifs that may be appended to the terminus of the extension arm of a pegRNA. Thus, in the case of a ′3 extension arm, the nucleotide motif would be coupled, attached, or otherwise linked to the 3′ of the pegRNA, optionally via a linker. In the case of a 5′ extension arm, the nucleotide motif would be coupled, attached, or otherwise linked to the 5′ end of the pegRNA, optionally via a linker.

TABLE 4
Mpknot 1 and variants

| | | |
|---|---|---|
| Mpknot1 | GGGTCAGGAGCCCCCCCCCTGAACCCAGGAT | SEQ ID NO: 195 |
| | AACCCTCAAAGTCGGGGGGCAACCC | |
| Mpknot1 3′ | GGGTCAGGAGCCCCCCCCCTGAACCCAGGAT | SEQ ID NO: 196 |
| trimmed | AACCCTCAAAGTCGGGGGGC | |
| Mpknot1 with 5′ | GTCAGGGTCAGGAGCCCCCCCCCTGAACCCA | SEQ ID NO: 197 |
| extra | GGATAACCCTCAAAGTCGGGGGGCAACCC | |
| Mpknot1 U38A | GGGTCAGGAGCCCCCCCCCTGAACCCAGGAA | SEQ ID NO: 198 |
| | AACCCTCAAAGTCGGGGGGCAACCC | |
| Mpknot1 U38A | GGGTCAGGAGCCCCCCCCCTGCACCCAGGAA | SEQ ID NO: 199 |
| A29C | AACCCTCAAAGTCGGGGGGCAACCC | |
| MMLC A29C | GGGTCAGGAGCCCCCCCCCTGCACCCAGGAT | SEQ ID NO: 200 |
| | AACCCTCAAAGTCGGGGGGCAACCC | |
| Mpknot1 with 5′ | GTCAGGGTCAGGAGCCCCCCCCCTGAACCCA | SEQ ID NO: 201 |
| extra and U38A | GGAAAACCCTCAAAGTCGGGGGGCAACCC | |
| Mpknot1 with 5′ | GTCAGGGTCAGGAGCCCCCCCCCTGCACCCA | SEQ ID NO: 202 |
| extra and U38A | GGAAAACCCTCAAAGTCGGGGGGCAACCC | |
| A29C | | |
| Mpknot1 with 5′ | GTCAGGGTCAGGAGCCCCCCCCCTGCACCCA | SEQ ID NO: 203 |
| extra and A29C | GGATAACCCTCAAAGTCGGGGGGCAACCC | |

TABLE 5
G quadruplexes

| | | |
|---|---|---|
| tns1 | Gggctgggatgggaaaggg | SEQ ID NO: 204 |
| stk40 | Gggacagggcagggacaggg | SEQ ID NO: 205 |
| apc2 | Gggtccgggtctgggtctggg | SEQ ID NO: 206 |
| ceacam4 | Gggctctgggtgggccggg | SEQ ID NO: 207 |
| pitpnm3 | Gggtgggctgggaaggg | SEQ ID NO: 208 |
| rlf | Gggagggagggctaggg | SEQ ID NO: 209 |
| erc1 | Gggctgggctgggcaggg | SEQ ID NO: 210 |
| ube3c | Gggcagggctgggaggg | SEQ ID NO: 211 |
| taf15 | Gggtgggagggctggg | SEQ ID NO: 212 |
| stard3 | Gggcagggtctgggctggg | SEQ ID NO: 213 |
| g2 | Tggtggtggtgg | SEQ ID NO: 214 |

TABLE 6
evopreql and similar/variant motifs

| | | |
|---|---|---|
| evopreq1 | TTGACGCGGTTCTATCTAGTTACGCGTTA | SEQ ID NO: |
| | AACCAACTAGAAA | 215 |
| evopreq1 | CGCGAGTCTAGGGGATAACGCGTTAAACT | SEQ ID NO: |
| motif1 | TCCTAGAAGGCGGTT | 216 |
| evopreq1 | CGCGGATCTAGATTGTAACGCGTTAAACC | SEQ ID NO: |
| motif2 | ATCTAGAAGGCGGTT | 217 |
| evopreq1 | CGCGTCGCTACCGCCCGGCGCGTTAAACA | SEQ ID NO: |
| motif3 | CACTAGAAGGCGGTT | 218 |
| shorter | CGCGGTTCTATCTAGTTACGCGTTAAACC | SEQ ID NO: |
| preq1-1 | AACTAGAA | 219 |
| preq1-1 | TTGACGCGCTTCTATCTAGTTACGCGTTA | SEQ ID NO: |
| G5C | AACCAACTAGAAA | 220 |
| (mut1) | | |
| preq1-1 | TTGACGCGGTTCTATCTACTTACGCGTTA | SEQ ID NO: |
| G15C | AACCAACTAGAAA | 221 |
| (mut2) | | |

TABLE 7
Modified tRNA that is used by MMLV RT as
a primer for reverse transcription

GGCGGGGCTCGTTGGTCTAGGGGTATGATTCTCGCTTCGGGTGCGAGAGG
TCCCGGGTTCAAATCCCGGACGAGCCCCGCC (SEQ ID NO: 222)

TABLE 8
Miscellaneous motifs

xrn1 - gcgtaacctccatccgagttgcaagagagggaaacgcagtctc
(SEQ ID NO: 223)
grp1 intron P4P6 - ggaattgcgggaaaggggtcaacagccgttc
agtaccaagtctcaggggaaactttgagatggccttgcaaagggtatggt
aataagctgacggacatggtcctaaccacgcagccaagtcctaagtcaac
agatcttctgttgatatggatgcagttca (SEQ ID NO: 224)

[0748] As indicated above, these motifs may be couples, attached, or otherwise joined to a canonical pegRNA via a linker. Exemplary linkers include, but are not limited to:

TABLE X6
Linkers for joining motifs to canonical pegRNA

| Genomic | | | Length |
|---|---|---|---|
| locus | Linker sequence | SEQ ID NO: | (nts) |
| HEK3 | TCTCTCTC | SEQ ID NO: 225 | 8 |
| HEK3 | TCTCTCTCACACACACAC | SEQ ID NO: 226 | 18 |
| RNF2 | TCATCTCT | SEQ ID NO: 227 | 8 |
| RNF2 | TCATCTCTACACACACAC | SEQ ID NO: 228 | 18 |
| FANCF | CAATCACT | SEQ ID NO: 229 | 8 |
| FANCF | CAATCACTACACACACAC | SEQ ID NO: 230 | 18 |
| RUNX1 | AACTCTCT | SEQ ID NO: 231 | 8 |
| RUNX1 | AACTCTCTACACACACAC | SEQ ID NO: 232 | 18 |
| EMX1 | AACAATCT | SEQ ID NO: 233 | 8 |
| EMX1 | AACAATCTACACACACAC | SEQ ID NO: 234 | 18 |
| DNMT1 | CCTCTTCT | SEQ ID NO: 235 | 8 |
| DNMT1 | CCTCTTCTACACACACAC | SEQ ID NO: 236 | 18 |

[0749] In some embodiments, a linker will be designed and/or selected based on the genomic site being targeted by prime editing and the modified pegRNA.

[0750] In various embodiments, it will be appreciated that a wide variety of nucleotide sequences will work reasonably well for each genomic target site. Linker length is also likely to be variable. In some cases, linkers ranging in length from 3-18 nucleotides will work. In other cases, the linker may be at least 3 nucleotides, at least 4 nucleotides, at least 5 nucleotides, at least 6 nucleotides, at least 7 nucleotides, at least 8 nucleotides, at least 9 nucleotides, at least 10 nucleotides, at least 11 nucleotides, at least 12 nucleotides, at least 13 nucleotides, at least 14 nucleotides, at least 15 nucleotides, at least 16 nucleotides, at least 17 nucleotides, at least 18 nucleotides, at least 19 nucleotides, at least 20 nucleotides, at least 21 nucleotides, at least 22 nucleotides, at least 23 nucleotides, at least 24 nucleotides, at least 25 nucleotides, at least 26 nucleotides, at least 27 nucleotides, at least 28 nucleotides, at least 29 nucleotides, or at least 30 nucleotides.

[0751] In one embodiment, the linker is 8 nucleotides in length.

[0752] The present disclosure also contemplates variants of the above nucleotide motifs and linkers which have at least 70%, at least 75%, at least 80%, at least 85%, at least 90%, at least 91%, at least 92%, at least 93%, at least 94%, at least 95%, at least 96%, at least 97%, at least 98%, at least 99%, or at least 99.9% sequence identity with any of the above motif and linker sequences.

[0753] The pegRNAs may also include additional design improvements that may modify the properties and/or characteristics of pegRNAs thereby improving the efficacy of prime editing. In various embodiments, these improvements may belong to one or more of a number of different categories, including but not limited to: (1) designs to enable efficient expression of functional pegRNAs from non-polymerase III (pol III) promoters, which would enable the expression of longer pegRNAs without burdensome sequence requirements; (2) improvements to the core, Cas9-binding pegRNA scaffold, which could improve efficacy; (3) modifications to the pegRNA to improve RT processivity, enabling the insertion of longer sequences at targeted genomic loci; and (4) addition of RNA motifs to the 5′ or 3′ termini of the pegRNA that improve pegRNA stability, enhance RT processivity, prevent misfolding of the pegRNA, or recruit additional factors important for genome editing.

[0754] In one embodiment, pegRNA could be designed with polIII promoters to improve the expression of longer-length pegRNA with larger extension arms. sgRNAs are typically expressed from the U6 snRNA promoter. This promoter recruits pol III to express the associated RNA and is useful for expression of short RNAs that are retained within the nucleus. However, pol III is not highly processive and is unable to express RNAs longer than a few hundred nucleotides in length at the levels required for efficient genome editing. Additionally, pol III can stall or terminate at stretches of U's, potentially limiting the sequence diversity that could be inserted using a pegRNA. Other promoters that recruit polymerase II (such as pCMV) or polymerase I (such as the U1 snRNA promoter) have been examined for their ability to express longer sgRNAs. However, these promoters are typically partially transcribed, which would result in extra sequence 5′ of the spacer in the expressed pegRNA, which has been shown to result in markedly reduced Cas9:sgRNA activity in a site-dependent manner. Additionally, while pol III-transcribed pegRNAs can simply terminate in a run of 6-7 U's, pegRNAs transcribed from pol II or pol I would require a different termination signal. Often such signals also result in polyadenylation, which would result in undesired transport of the pegRNA from the nucleus. Similarly, RNAs expressed from pol II promoters such as pCMV are typically 5′-capped, also resulting in their nuclear export.

[0755] Exemplary U6 promoters include, but are not limited to:

U6 promoter:
(SEQ ID NO: 237)
GAGGGCCTATTTCCCATGATTCCTTCATATTTGCATATACGATACAAGGC
TGTTAGAGAGATAATTAGAATTAATTTGACTGTAAACACAAAGATATTAG
TACAAAATACGTGACGTAGAAAGTAATAATTTCTTGGGTAGTTTGCAGTT
TTAAAATTATGTTTTAAAATGGACTATCATATGCTTACCGTAACTTGAAA
GTATTTCGATTTCTTGGCTTTATATATCTTGTGGAAAGGACGAAACACCG
U6v9 promoter:
(SEQ ID NO: 238)
GCCTGAGGCGTGGGGCCGCCTCCCAAAGACTTCTGGGAGGGCGGTGCGGC
TCAGGCTCTGCCCCGCCTCCGGGGCTATTTGCATACGACCATTTCCAGTA
ATTCCCAGCAGCCACCGTAGCTATATTTGGTAGAACAACGAGCACTTTCT
CAACTCCAGTCAATAACTACGTTAGTTGCATTACACATTGGGCTAATATA
AATAGAGGTTAAATCTCTAGGTCATTTAAGAGAAGTCGGCCTATGTGTAC
AGACATTTGTTCCAGGGGCTTTAAATAGCTGGTGGTGGAACTCAATATTC
G
U6v7 promoter:
(SEQ ID NO: 239)
AAGTCCGCGGCACGAGAAATCAAAGCCCCGGGGCCTGGGTCCCACGCGGG
GTCCCTTACCCAGGGTGCCCCGGGCGCTCATTTGCATGTCCCACCCAACA
GGTAAACCTGACAGATCGGTCGCGGCCAGGTACGGCCTGGCGGTCAGAGC
ACCAAACTTACGAGCCTTGTGATGAGTTCCGTTACATGAAATTCTCCTAA
AGGCTCCAAGATGGACAGGAAAGCGCTCGATTAGGTTACCGTAAGGAAAA
CAAATGAGAAACTCCCGTGCCTTATAAGACCTGGGGACGGACTTATTTGC
G
U6v4 promoter:
(SEQ ID NO: 240)
AAATTGAGTCATCTGACAGAAATTATCTTTGGCAAGGTTTTAGTCCTAGG
GTTACCAGATGGAATACAGGACATCCATTTAAATTTGAATTTCAGATAAA
CAGTTAACACTTCTCAAGGATAAATATGCCTCAAATATTGCACGGGACAT
ATTTATACTAAAAAAAAAGTGTTTTTTTTTTTCCTGCGATTCAAACTTAA
CTGGTGTCCTGCATTTGTATTTGTTAAATCTGTCAATCCTATCTCAGTTT
CCTTTGATGGAATGTACCTCTGTGCTAATATTTAAAAATAGGTTACATTT
G

[0756] One of ordinary skill in the art will appreciate that these promoter sequences can be trimmed at the 5′ and still function at the same or nearly the same level. For example, any of the U6 promoters could be trimmed at the 5′ end by removing up to 1, 10, 20, 30, 40, 50, 60, 70, 80, 90, or 100 nucleotides from the 5′end, i.e., approximately 30% of the promoter length. In other embodiments, up to 1%, 2%, 3%, 4%, 5%, 6%, 7%, 8%, 9%, 10%, 11%, 12%, 13%, 14%, 15%, 16%, 17%, 18%, 19%, 19%, 20%, 21%, 22%, 23%, 24%, 25%, 26%, 27%, 28%, 29%, or up to 30% of the length of the promoter from the 5′ end.

[0757] One of ordinary skill in the art will also appreciate that other promoters could be used to improve the expression of longer length pegRNAs with larger extension arms. For example, in different cell types, other promoters may be preferred and result in greater expression of the longer length pegRNAs.

[0758] Previously, Rinn and coworkers screened a variety of expression platforms for the production of long-noncoding RNA- (lncRNA) tagged sgRNAs¹⁸³. These platforms include RNAs expressed from pCMV and that terminate in the ENE element from the MALAT1 ncRNA from humans¹⁸⁴, the PAN ENE element from KSHViss, or the 3′ box from U1 snRNA¹⁸⁶. Notably, the MALAT1 ncRNA and PAN ENEs form triple helices protecting the polyA-tail^{184, 187}. These constructs could also enhance RNA stability. It is contemplated that these expression systems will also enable the expression of longer pegRNAs.

[0759] In addition, a series of methods have been designed for the cleavage of the portion of the pol II promoter that would be transcribed as part of the pegRNA, adding either a self-cleaving ribozyme such as the hammerhead¹⁸⁸, pistol¹⁸⁹, hatchet¹⁸⁹, hairpin¹⁹⁰, VS¹⁹¹, twister¹⁹², or twister sister¹⁹² ribozymes, or other self-cleaving elements to process the transcribed guide, or a hairpin that is recognized by Csy4¹⁹³ and also leads to processing of the guide. Also, incorporation of multiple ENE motifs can lead to improved pegRNA expression and stability. Circularizing, as previously demonstrated for the KSHV PAN RNA and element¹⁸⁵. It is also anticipated that circularizing the pegRNA in the form of a circular intronic RNA (ciRNA) can lead to enhanced RNA expression and stability, as well as nuclear localization.

[0760] In various embodiments, the pegRNA may include various above elements, as exemplified by the following sequence.

[0761] Non-limiting example 1—pegRNA expression platform consisting of pCMV, Csy4 hairpin, the pegRNA, and MALAT1 ENE

(SEQ ID NO: 241)
TAGTTATTAATAGTAATCAATTACGGGGTCATTAGTTCATAGCCCATATA
TGGAGTTCCGCGTTACATAACTTACGGTAAATGGCCCGCCTGGCTGACCG
CCCAACGACCCCCGCCCATTGACGTCAATAATGACGTATGTTCCCATAGT
AACGCCAATAGGGACTTTCCATTGACGTCAATGGGTGGAGTATTTACGGT
AAACTGCCCACTTGGCAGTACATCAAGTGTATCATATGCCAAGTACGCCC
CCTATTGACGTCAATGACGGTAAATGGCCCGCCTGGCATTATGCCCAGTA
CATGACCTTATGGGACTTTCCTACTTGGCAGTACATCTACGTATTAGTCA
TCGCTATTACCATGGTGATGCGGTTTTGGCAGTACATCAATGGGCGTGGA
TAGCGGTTTGACTCACGGGGATTTCCAAGTCTCCACCCCATTGACGTCAA
TGGGAGTTTGTTTTGGCACCAAAATCAACGGGACTTTCCAAAATGTCGTA
ACAACTCCGCCCCATTGACGCAAATGGGCGGTAGGCGTGTACGGTGGGAG
GTCTATATAAGCAGAGCTGGTTTAGTGAACCGTCAGATCGTTCACTGCCG
TATAGGCAGGGCCCAGACTGAGCACGTGAGTTTTAGAGCTAGAAATAGCA
AGTTAAAATAAGGCTAGTCCGTTATCAACTTGAAAAAGTGGGACCGAGTC
GGTCCTCTGCCATCAAAGCGTGCTCAGTCTGTTTTAGGGTCATGAAGGTT
TTTCTTTTCCTGAGAAAACAACACGTATTGTTTTCTCAGGTTTTGCTTTT
TGGCCTTTTTCTAGCTTAAAAAAAAAAAAAGCAAAAGATGCTGGTGGTTG
GCACTCCTGGTTTCCAGGACGGGGTTCAAATCCCTGCGGCGTCTTTGCTT
TGACT

[0762] Non-limiting example 2—pegRNA expression platform consisting of pCMV, Csy4 hairpin, the pegRNA, and PAN ENE

(SEQ ID NO: 242)
TAGTTATTAATAGTAATCAATTACGGGGTCATTAGTTCATAGCCCATATA
TGGAGTTCCGCGTTACATAACTTACGGTAAATGGCCCGCCTGGCTGACCG
CCCAACGACCCCCGCCCATTGACGTCAATAATGACGTATGTTCCCATAGT
AACGCCAATAGGGACTTTCCATTGACGTCAATGGGTGGAGTATTTACGGT
AAACTGCCCACTTGGCAGTACATCAAGTGTATCATATGCCAAGTACGCCC
CCTATTGACGTCAATGACGGTAAATGGCCCGCCTGGCATTATGCCCAGTA
CATGACCTTATGGGACTTTCCTACTTGGCAGTACATCTACGTATTAGTCA
TCGCTATTACCATGGTGATGCGGTTTTGGCAGTACATCAATGGGCGTGGA
TAGCGGTTTGACTCACGGGGATTTCCAAGTCTCCACCCCATTGACGTCAA
TGGGAGTTTGTTTTGGCACCAAAATCAACGGGACTTTCCAAAATGTCGTA
ACAACTCCGCCCCATTGACGCAAATGGGCGGTAGGCGTGTACGGTGGGAG
GTCTATATAAGCAGAGCTGGTTTAGTGAACCGTCAGATCGTTCACTGCCG
TATAGGCAGGGCCCAGACTGAGCACGTGAGTTTTAGAGCTAGAAATAGCA
AGTTAAAATAAGGCTAGTCCGTTATCAACTTGAAAAAGTGGGACCGAGTC
GGTCCTCTGCCATCAAAGCGTGCTCAGTCTGTTTTGTTTTGGCTGGGTTT
TTCCTTGTTCGCACCGGACACCTCCAGTGACCAGACGGCAAGGTTTTTAT
CCCAGTGTATATTGGAAAAACATGTTATACTTTTGACAATTTAACGTGCC
TAGAGCTCAAATTAAACTAATACCATAACGTAATGCAACTTACAACATAA
ATAAAGGTCAATGTTTAATCCATAAAAAAAAAAAAAAAAAAA

[0763] Non-limiting example 3—pegRNA expression platform consisting of pCMV, Csy4 hairpin, the pegRNA, and 3×PAN ENE

(SEQ ID NO: 243)
TAGTTATTAATAGTAATCAATTACGGGGTCATTAGTTCATAGCCCATATA
TGGAGTTCCGCGTTACATAACTTACGGTAAATGGCCCGCCTGGCTGACCG
CCCAACGACCCCCGCCCATTGACGTCAATAATGACGTATGTTCCCATAGT
AACGCCAATAGGGACTTTCCATTGACGTCAATGGGTGGAGTATTTACGGT
AAACTGCCCACTTGGCAGTACATCAAGTGTATCATATGCCAAGTACGCCC
CCTATTGACGTCAATGACGGTAAATGGCCCGCCTGGCATTATGCCCAGTA
CATGACCTTATGGGACTTTCCTACTTGGCAGTACATCTACGTATTAGTCA
TCGCTATTACCATGGTGATGCGGTTTTGGCAGTACATCAATGGGCGTGGA
TAGCGGTTTGACTCACGGGGATTTCCAAGTCTCCACCCCATTGACGTCAA
TGGGAGTTTGTTTTGGCACCAAAATCAACGGGACTTTCCAAAATGTCGTA
ACAACTCCGCCCCATTGACGCAAATGGGCGGTAGGCGTGTACGGTGGGAG
GTCTATATAAGCAGAGCTGGTTTAGTGAACCGTCAGATCGTTCACTGCCG
TATAGGCAGGGCCCAGACTGAGCACGTGAGTTTTAGAGCTAGAAATAGCA
AGTTAAAATAAGGCTAGTCCGTTATCAACTTGAAAAAGTGGGACCGAGTC
GGTCCTCTGCCATCAAAGCGTGCTCAGTCTGTTTTGTTTTGGCTGGGTTT
TTCCTTGTTCGCACCGGACACCTCCAGTGACCAGACGGCAAGGTTTTTAT
CCCAGTGTATATTGGAAAAACATGTTATACTTTTGACAATTTAACGTGCC
TAGAGCTCAAATTAAACTAATACCATAACGTAATGCAACTTACAACATAA
ATAAAGGTCAATGTTTAATCCATAAAAAAAAAAAAAAAAAAAACACACTG
TTTTGGCTGGGTTTTTCCTTGTTCGCACCGGACACCTCCAGTGACCAGAC
GGCAAGGTTTTTATCCCAGTGTATATTGGAAAAACATGTTATACTTTTGA
CAATTTAACGTGCCTAGAGCTCAAATTAAACTAATACCATAACGTAATGC
AACTTACAACATAAATAAAGGTCAATGTTTAATCCATAAAAAAAAAAAAA
AAAAAATCTCTCTGTTTTGGCTGGGTTTTTCCTTGTTCGCACCGGACACC
TCCAGTGACCAGACGGCAAGGTTTTTATCCCAGTGTATATTGGAAAAACA
TGTTATACTTTTGACAATTTAACGTGCCTAGAGCTCAAATTAAACTAATA
CCATAACGTAATGCAACTTACAACATAAATAAAGGTCAATGTTTAATCCA
TAAAAAAAAAAAAAAAAAAA

[0764] Non-limiting example 4—pegRNA expression platform consisting of pCMV, Csy4 hairpin, the pegRNA, and 3′ box

(SEQ ID NO: 244)
TAGTTATTAATAGTAATCAATTACGGGGTCATTAGTTCATAGCCCATATA
TGGAGTTCCGCGTTACATAACTTACGGTAAATGGCCCGCCTGGCTGACCG
CCCAACGACCCCCGCCCATTGACGTCAATAATGACGTATGTTCCCATAGT
AACGCCAATAGGGACTTTCCATTGACGTCAATGGGTGGAGTATTTACGGT
AAACTGCCCACTTGGCAGTACATCAAGTGTATCATATGCCAAGTACGCCC
CCTATTGACGTCAATGACGGTAAATGGCCCGCCTGGCATTATGCCCAGTA
CATGACCTTATGGGACTTTCCTACTTGGCAGTACATCTACGTATTAGTCA
TCGCTATTACCATGGTGATGCGGTTTTGGCAGTACATCAATGGGCGTGGA
TAGCGGTTTGACTCACGGGGATTTCCAAGTCTCCACCCCATTGACGTCAA
TGGGAGTTTGTTTTGGCACCAAAATCAACGGGACTTTCCAAAATGTCGTA
ACAACTCCGCCCCATTGACGCAAATGGGCGGTAGGCGTGTACGGTGGGAG
GTCTATATAAGCAGAGCTGGTTTAGTGAACCGTCAGATCGTTCACTGCCG
TATAGGCAGGGCCCAGACTGAGCACGTGAGTTTTAGAGCTAGAAATAGCA
AGTTAAAATAAGGCTAGTCCGTTATCAACTTGAAAAAGTGGGACCGAGTC
GGTCCTCTGCCATCAAAGCGTGCTCAGTCTGTTTGTTTCAAAAGTAGACT
GTACGCTAAGGGTCATATCTTTTTTTGTTTGGTTTGTGTCTTGGTTGGCG
TCTTAAA

[0765] Non-limiting example 5—pegRNA expression platform consisting of pU1, Csy4 hairpin, the pegRNA, and 3′ box

(SEQ ID NO: 245)
CTAAGGACCAGCTTCTTTGGGAGAGAACAGACGCAGGGGCGGGAGGGAAA
AAGGGAGAGGCAGACGTCACTTCCCCTTGGCGGCTCTGGCAGCAGATTGG
TCGGTTGAGTGGCAGAAAGGCAGACGGGGACTGGGCAAGGCACTGTCGGT
GACATCACGGACAGGGCGACTTCTATGTAGATGAGGCAGCGCAGAGGCTG
CTGCTTCGCCACTTGCTGCTTCACCACGAAGGAGTTCCCGTGCCCTGGGA
GCGGGTTCAGGACCGCTGATCGGAAGTGAGAATCCCAGCTGTGTGTCAGG
GCTGGAAAGGGCTCGGGAGTGCGCGGGGCAAGTGACCGTGTGTGTAAAGA
GTGAGGCGTATGAGGCTGTGTCGGGGCAGAGGCCCAAGATCTCAGTTCAC
TGCCGTATAGGCAGGGCCCAGACTGAGCACGTGAGTTTTAGAGCTAGAAA
TAGCAAGTTAAAATAAGGCTAGTCCGTTATCAACTTGAAAAAGTGGGACC
GAGTCGGTCCTCTGCCATCAAAGCGTGCTCAGTCTGTTTCAGCAAGTTCA
GAGAAATCTGAACTTGCTGGATTTTTGGAGCAGGGAGATGGAATAGGAGC
TTGCTCCGTCCACTCCACGCATCGACCTGGTATTGCAGTACCTCCAGGAA
CGGTGCACCCACTTTCTGGAGTTTCAAAAGTAGACTGTACGCTAAGGGTC
ATATCTTTTTTTGTTTGGTTTGTGTCTTGGTTGGCGTCTTAAA.

[0766] In various other embodiments, the pegRNA may be improved by introducing improvements to the scaffold or core sequences.

[0767] The core, Cas9-binding pegRNA scaffold can be improved to enhance PE activity. In an exemplary approach, the first pairing element of the scaffold (P1) contains a GTTTT-AAAAC (SEQ ID NO: 246) pairing element. Such runs of Ts can result in pol III pausing and premature termination of the RNA transcript. Rational mutation of one of the T-A pairs to a G-C pair in this portion of P1 can enhance sgRNA activity. This approach can be used to improve pegRNAs. Additionally, increasing the length of P1 can enhance sgRNA folding and lead to improved pegRNA activity. Example improvements to the core can include:

pegRNA containing a 6 nt extension to P1
(SEQ ID NO: 247)
GGCCCAGACTGAGCACGTGAGTTTTAGAGCTAGCTCATGAAAATGAGCTA
GCAAGTTAAAATAAGGCTAGTCCGTTATCAACTTGAAAAAGTGGGACCGA
GTCGGTCCTCTGCCATCAAAGCGTGCTCAGTCTGTTTTTTT
pegRNA containing a T-A to G-C mutation
within P1
(SEQ ID NO: 248)
GGCCCAGACTGAGCACGTGAGTTTGAGAGCTAGAAATAGCAAGTTTAAAT
AAGGCTAGTCCGTTATCAACTTGAAAAAGTGGGACCGAGTCGGTCCTCTG
CCATCAAAGCGTGCTCAGTCTGTTTTTTT
pegRNA split into CRISPR- and tracrRNA
components:
(SEQ ID NO: 249)
GGCCCAGACTGAGCACGTGAGTTTTAGAGCTAGA
(SEQ ID NO: 250)
AATAGCAAGTTAAAATAAGGCTAGTCCGTTATCAACTTGAAAAAGTGGGA
CCGAGTCGGTCCTCTGCCATCAAAGCGTGCTCAGTCTG

[0768] In various other embodiments, the pegRNA may be improved by introducing modifications to the edit template region. As the size of the insertion templated by the pegRNA increases, it is more likely to be degraded by endonucleases, undergo spontaneous hydrolysis, or fold into secondary structures unable to be reverse-transcribed by the RT or that disrupt folding of the pegRNA scaffold and subsequent Cas9-RT binding. Accordingly, it is likely that modification to the template of the pegRNA might be necessary to affect large insertions, such as the insertion of whole genes. Some strategies to do so include the incorporation of modified nucleotides within a synthetic or semi-synthetic pegRNA that render the RNA more resistant to degradation or hydrolysis or less likely to adopt inhibitory secondary structures¹⁹⁶. Such modifications could include 8-aza-7-deazaguanosine, which would reduce RNA secondary structure in G-rich sequences; locked-nucleic acids (LNA) that reduce degradation and enhance certain kinds of RNA secondary structure; 2′-O-methyl, 2′-fluoro, or 2′-O-methoxyethoxy modifications that enhance RNA stability. Such modifications could also be included elsewhere in the pegRNA to enhance stability and activity. Alternatively or additionally, the template of the pegRNA could be designed such that it both encodes for a desired protein product and is also more likely to adopt simple secondary structures that are able to be unfolded by the RT. Such simple structures would act as a thermodynamic sink, making it less likely that more complicated structures that would prevent reverse transcription would occur. Finally, one could also split the template into two, separate pegRNAs. In such a design, a PE would be used to initiate transcription and also recruit a separate template RNA to the targeted site via an RNA-binding protein fused to Cas9 or an RNA recognition element on the pegRNA itself such as the MS2 aptamer. The RT could either directly bind to this separate template RNA, or initiate reverse transcription on the original pegRNA before swapping to the second template. Such an approach could enable long insertions by both preventing misfolding of the pegRNA upon addition of the long template and also by not requiring dissociation of Cas9 from the genome for long insertions to occur, which could possibly be inhibiting PE-based long insertions.

[0769] In still other embodiments, the pegRNA may be improved by introducing additional RNA motifs at the 5′ and 3′ termini of the pegRNAs, or even at positions therein between (e.g., in the gRNA core region, or the spacer). Several such motifs—such as the PAN ENE from KSHV and the ENE from MALAT1 were discussed above as possible means to terminate expression of longer pegRNAs from non-pol III promoters. These elements form RNA triple helices that engulf the polyA tail, resulting in their being retained within the nucleus^{184,187} However, by forming complex structures at the 3′ terminus of the pegRNA that occlude the terminal nucleotide, these structures would also likely help prevent exonuclease-mediated degradation of pegRNAs.

[0770] Other structural elements inserted at the 3′ terminus could also enhance RNA stability, albeit without enabling termination from non-pol III promoters. Such motifs could include hairpins or RNA quadruplexes that would occlude the 3′ terminus¹⁹⁷, or self-cleaving ribozymes such as HDV that would result in the formation of a 2′-3′-cyclic phosphate at the 3′ terminus and also potentially render the pegRNA less likely to be degraded by exonucleases¹⁹⁸. Inducing the pegRNA to cyclize via incomplete splicing—to form a ciRNA—could also increase pegRNA stability and result in the pegRNA being retained within the nucleus¹⁹⁴

[0771] Additional RNA motifs could also improve RT processivity or enhance pegRNA activity by enhancing RT binding to the DNA-RNA duplex. Addition of the native sequence bound by the RT in its cognate retroviral genome could enhance RT activity¹⁹⁹. This could include the native primer binding site (PBS), polypurine tract (PPT), or kissing loops involved in retroviral genome dimerization and initiation of transcription¹⁹⁹.

[0772] Addition of dimerization motifs—such as kissing loops or a GNRA tetraloop/tetraloop receptor pair²⁰⁰—at the 5′ and 3′ termini of the pegRNA could also result in effective circularization of the pegRNA, improving stability. Additionally, it is envisioned that addition of these motifs could enable the physical separation of the pegRNA spacer and primer, preventing prevention occlusion of the spacer which could would hinder PE activity. Short 5′ extensions or 3′ extensions to the pegRNA that form a small toehold hairpin in the spacer region or along the primer binding site could also compete favorably against the annealing of intracomplementary regions along the length of the pegRNA, e.g., the interaction between the spacer and the primer binding site that can occur. Finally, kissing loops could also be used to recruit other template RNAs to the genomic site and enable swapping of RT activity from one RNA to the other. As exemplary embodiments of various secondary structures, the pegRNA depicted in FIG. 3D and FIG. 3E list a number secondary RNA structures that may be engineered into any region of the pegRNA, including in the terminal portions of the extension arm (i.e., eland e2), as shown.

[0773] Example improvements include, but are not limited to:

pegRNA-HDV fusion
(SEQ ID NO: 251)
GGCCCAGACTGAGCACGTGAGTTTTAGAGCTAGAAATAGCAAGTTAAAAT
AAGGCTAGTCCGTTATCAACTTGAAAAAGTGGGACCGAGTCGGTCCTCTG
CCATCAAAGCGTGCTCAGTCTGGGCCGGCATGGTCCCAGCCTCCTCGCTG
GCGCCGGCTGGGCAACATGCTTCGGCATGGCGAATGGGACTTTTTTT
pegRNA-MMLV kissing loop
(SEQ ID NO: 252)
GGTGGGAGACGTCCCACCGGCCCAGACTGAGCACGTGAGTTTTAGAGCTA
GAAATAGCAAGTTAAAATAAGGCTAGTCCGTTATCAACTTGAAAAAGTGG
GACCGAGTCGGTCCTCTGCCATCAAAGCTTCGACCGTGCTCAGTCTGGTG
GGAGACGTCCCACCTTTTTTT
pegRNA-VS ribozyme kissing loop
(SEQ ID NO: 253)
GAGCAGCATGGCGTCGCTGCTCACGGCCCAGACTGAGCACGTGAGTTTTA
GAGCTAGAAATAGCAAGTTAAAATAAGGCTAGTCCGTTATCAACTTGAAA
AAGTGGGACCGAGTCGGTCCTCTGCCATCAAAGCTTCGACCGTGCTCAGT
CTCCATCAGTTGACACCCTGAGGTTTTTTT
pegRNA-GNRA tetraloop/tetraloop receptor
(SEQ ID NO: 254)
GCAGACCTAAGTGGUGACATATGGTCTGGGCCCAGACTGAGCACGTGAGT
TTTAGAGCTAUACGTAGCAAGTTAAAATAAGGCTAGTCCGTTATCAACTT
UACGAAGTGGGACCGAGTCGGTCCTCTGCCATCAAAGCTTCGACCGTGCT
CAGTCTGCATGCGATTAGAAATAATCGCATGTTTTTTT
pegRNA template switching secondary
RNA-HDV fusion
(SEQ ID NO: 255)
TCTGCCATCAAAGCTGCGACCGTGCTCAGTCTGGTGGGAGACGTCCCACC
GGCCGGCATGGTCCCAGCCTCCTCGCTGGCGCCGGCTGGGCAACATGCTT
CGGCATGGCGAATGGGACTTTTTTT

[0774] pegRNA scaffold could be further improved via directed evolution, in an analogous fashion to how SpCas9 and prime editor (PE) have been improved. Directed evolution could enhance pegRNA recognition by Cas9 or evolved Cas9 variants. Additionally, it is likely that different pegRNA scaffold sequences would be optimal at different genomic loci, either enhancing PE activity at the site in question, reducing off-target activities, or both. Finally, evolution of pegRNA scaffolds to which other RNA motifs have been added would almost certainly improve the activity of the fused pegRNA relative to the unevolved, fusion RNA. For instance, evolution of allosteric ribozymes composed of c-di-GMP-I aptamers and hammerhead ribozymes led to dramatically improved activity²⁰², suggesting that evolution would improve the activity of hammerhead-pegRNA fusions as well. In addition, while Cas9 currently does not generally tolerate 5′ extension of the sgRNA, directed evolution will likely generate enabling mutations that mitigate this intolerance, allowing additional RNA motifs to be utilized.

[0775] In various embodiments, other scaffolds that have been shown to improve activity relative to canonical sgRNA scaffolds may be used in pegRNAs and epegRNAs as described herein. Such improvements may include, for example, those disclosed in Chen, B. et al. Dynamic Imaging of Genomic Loci in Living Human Cells by an Optimized CRISPR/Cas System. Cell. 2013, 155(7), 1479-1471 and Jost, M. et al. Titrating expression using libraries of systematically attenuated CRISPR guide RNAs. Nat. Biotechnol. 2020, 38, 355-364, which are herein incorporated by reference in their entirety. These improvements may enhance epegRNA activity through improved binding to the prime editor and/or improved expression. Stabilization of the sgRNA scaffold could also reduce PBS/spacer interactions that inhibit pegRNA and epegRNA activity.

[0776] Example epegRNAs incorporating improved sgRNA scaffolds include, but are not limited to:

HEK3 1-15del standard scaffold evopreQ1
(SEQ ID NO: 256)
GGCCCAGACTGAGCACGTGAGTTTTAGAGCTAGAAATAGCAAGTTAAAAT
AAGGCTAGTCCGTTATCAACTTGAAAAAGTGGCACCGAGTCGGTGCGCCC
TCTGGAGGAAGCAGGGCTTCCCGTGCTCAGTCTGTCTCTCTCTTGACGCG
GTTCTATCTAGTTACGCGTTAAACCAACTAGAAATTTTTT
HEK3 1-15del cr748 evopreQ1
(SEQ ID NO: 257)
GGCCCAGACTGAGCACGTGAGTTTAAGAGCTAAGCTGGAAACAGCATAGC
AAGTTTAAATAAGGCTAGTCCGTTATCAACTCGAGAGAGTGGCACCGAGT
CGGTGCTGCCCTCTGGAGGAAGCAGGGCTTCCCGTGCTCAGTCTGTCTCT
CTCTTGACGCGGTTCTATCTAGTTACGCGTTAAACCAACTAGAAATTTTT
T
HEK3 1-15del cr289 evopreQ1
(SEQ ID NO: 258)
GGCCCAGACTGAGCACGTGAGTTTAAGAGCTAAGCTGGAAACAGCATAGC
AAGTTTAAATAAGGCTAGTCCGTTATCAACTGGAAACAGTGGCACCGAGT
CGGTGCTGCCCTCTGGAGGAAGCAGGGCTTCCCGTGCTCAGTCTGTCTCT
CTCTTGACGCGGTTCTATCTAGTTACGCGTTAAACCAACTAGAAATTTTT
T
HEK3 1-15del cr622 evopreQ1
(SEQ ID NO: 259)
GGCCCAGACTGAGCACGTGAGTTTAAGAGCTAAGCTGGAAACAGCATAGC
AAGTTTAAATAAGGCTAGTCCGTTATCAGCTGGAAACAGCGGCACCGAGT
CGGTGCTGCCCTCTGGAGGAAGCAGGGCTTCCCGTGCTCAGTCTGTCTCT
CTCTTGACGCGGTTCTATCTAGTTACGCGTTAAACCAACTAGAAATTTTT
T
HEK3 1-15del cr772 evopreQ1
(SEQ ID NO: 260)
GGCCCAGACTGAGCACGTGAGTTTAAGAGCTAAGCTGGAAACAGCATAGC
AAGTTTAAATAAGGCTAGTCCGTTATCAACTCGAAAGAGTGGCACCGAGT
CGGTGCTGCCCTCTGGAGGAAGCAGGGCTTCCCGTGCTCAGTCTGTCTCT
CTCTTGACGCGGTTCTATCTAGTTACGCGTTAAACCAACTAGAAATTTTT
T
HEK3 1-15del cr532 evopreQ1
(SEQ ID NO: 261)
GGCCCAGACTGAGCACGTGAGTTTAAGAGCTAAGCTGGAAACAGCATAGC
AAGTTTAAATAAGGCTAGTCCGTTATCAACGTGAAAACGTGACTCCGAGT
CGGAGTTGCCCTCTGGAGGAAGCAGGGCTTCCCGTGCTCAGTCTGTCTCT
CTCTTGACGCGGTTCTATCTAGTTACGCGTTAAACCAACTAGAAATTTTT
T
HEK3 1-15del cr961 evopreQ1
(SEQ ID NO: 262)
GGCCCAGACTGAGCACGTGAGTTTAAGAGCTAAGCTGGAAACAGCATAGC
AAGTTTAAATAAGGCTAGTCCGTTATCAACTCGAAAGAGTGCAACCGAGT
CGGTTGTGCCCTCTGGAGGAAGCAGGGCTTCCCGTGCTCAGTCTGTCTCT
CTCTTGACGCGGTTCTATCTAGTTACGCGTTAAACCAACTAGAAATTTTT
T
HEK3 1-15del flip and extension
scaffold evopreQ1
(SEQ ID NO: 263)
GGCCCAGACTGAGCACGTGAGTTTAAGAGCTAAGCTGGAAACAGCATAGC
AAGTTTAAATAAGGCTAGTCCGTTATCAACTTGAAAAAGTGGCACCGAGT
CGGTGCTGCCCTCTGGAGGAAGCAGGGCTTCCCGTGCTCAGTCTGTCTCT
CTCTTGACGCGGTTCTATCTAGTTACGCGTTAAACCAACTAGAAATTTTT
T
RNF2 1-15del cr748 evopreQ1
(SEQ ID NO: 264)
GTCATCTTAGTCATTACCTGGTTTAAGAGCTAAGCTGGAAACAGCATAGC
AAGTTTAAATAAGGCTAGTCCGTTATCAACTCGAGAGAGTGGCACCGAGT
CGGTGCTATGGGAACTCAGTTTATATGAGTTAGTAATGACTAAGATGTCA
TCTCTTTGACGCGGTTCTATCTAGTTACGCGTTAAACCAACTAGAAATTT
TTT
RNF2 1-15del cr289 evopreQ1
(SEQ ID NO: 265)
GTCATCTTAGTCATTACCTGGTTTAAGAGCTAAGCTGGAAACAGCATAGC
AAGTTTAAATAAGGCTAGTCCGTTATCAACTGGAAACAGTGGCACCGAGT
CGGTGCTATGGGAACTCAGTTTATATGAGTTAGTAATGACTAAGATGTCA
TCTCTTTGACGCGGTTCTATCTAGTTACGCGTTAAACCAACTAGAAATTT
TTT
RNF2 1-15del cr622 evopreQ1
(SEQ ID NO: 266)
GTCATCTTAGTCATTACCTGGTTTAAGAGCTAAGCTGGAAACAGCATAGC
AAGTTTAAATAAGGCTAGTCCGTTATCAGCTGGAAACAGCGGCACCGAGT
CGGTGCTATGGGAACTCAGTTTATATGAGTTAGTAATGACTAAGATGTCA
TCTCTTTGACGCGGTTCTATCTAGTTACGCGTTAAACCAACTAGAAATTT
TTT
RNF2 1-15del cr772 evopreQ1
(SEQ ID NO: 267)
GTCATCTTAGTCATTACCTGGTTTAAGAGCTAAGCTGGAAACAGCATAGC
AAGTTTAAATAAGGCTAGTCCGTTATCAACTCGAAAGAGTGGCACCGAGT
CGGTGCTATGGGAACTCAGTTTATATGAGTTAGTAATGACTAAGATGTCA
TCTCTTTGACGCGGTTCTATCTAGTTACGCGTTAAACCAACTAGAAATTT
TTT
RNF2 1-15del cr532 evopreQ1
(SEQ ID NO: 268)
GTCATCTTAGTCATTACCTGGTTTAAGAGCTAAGCTGGAAACAGCATAGC
AAGTTTAAATAAGGCTAGTCCGTTATCAACGTGAAAACGTGACTCCGAGT
CGGAGTTATGGGAACTCAGTTTATATGAGTTAGTAATGACTAAGATGTCA
TCTCTTTGACGCGGTTCTATCTAGTTACGCGTTAAACCAACTAGAAATTT
TTT
RNF2 1-15del cr961 evopreQ1
(SEQ ID NO: 269)
GTCATCTTAGTCATTACCTGGTTTAAGAGCTAAGCTGGAAACAGCATAGC
AAGTTTAAATAAGGCTAGTCCGTTATCAACTCGAAAGAGTGCAACCGAGT
CGGTTGTATGGGAACTCAGTTTATATGAGTTAGTAATGACTAAGATGTCA
TCTCTTTGACGCGGTTCTATCTAGTTACGCGTTAAACCAACTAGAAATTT
TTT
RNF2 1-15del flip and extension
scaffold evopreQ1
(SEQ ID NO: 270)
GTCATCTTAGTCATTACCTGGTTTAAGAGCTAAGCTGGAAACAGCATAGC
AAGTTTAAATAAGGCTAGTCCGTTATCAACTTGAAAAAGTGGCACCGAGT
CGGTGCTATGGGAACTCAGTTTATATGAGTTAGTAATGACTAAGATGTCA
TCTCTTTGACGCGGTTCTATCTAGTTACGCGTTAAACCAACTAGAAATTT
TTT
RUNX1 1-15del standard scaffold
evopreQ1
(SEQ ID NO: 271)
GCATTTTCAGGAGGAAGCGAGTTTTAGAGCTAGAAATAGCAAGTTAAAAT
AAGGCTAGTCCGTTATCAACTTGAAAAAGTGGCACCGAGTCGGTGCTACG
AAGGAAATGACTCAAATATGCCTTCCTCCTGAAAATAACTCTCTTTGACG
CGGTTCTATCTAGTTACGCGTTAAACCAACTAGAAATTTTTT
RUNX1 1-15del cr748 evopreQ1
(SEQ ID NO: 272)
GCATTTTCAGGAGGAAGCGAGTTTAAGAGCTAAGCTGGAAACAGCATAGC
AAGTTTAAATAAGGCTAGTCCGTTATCAACTCGAGAGAGTGGCACCGAGT
CGGTGCTTACGAAGGAAATGACTCAAATATGCCTTCCTCCTGAAAATAAC
TCTCTTTGACGCGGTTCTATCTAGTTACGCGTTAAACCAACTAGAAATTT
TTT
RUNX1 1-15del cr289 evopreQ1
(SEQ ID NO: 273)
GCATTTTCAGGAGGAAGCGAGTTTAAGAGCTAAGCTGGAAACAGCATAGC
AAGTTTAAATAAGGCTAGTCCGTTATCAACTGGAAACAGTGGCACCGAGT
CGGTGCTTACGAAGGAAATGACTCAAATATGCCTTCCTCCTGAAAATAAC
TCTCTTTGACGCGGTTCTATCTAGTTACGCGTTAAACCAACTAGAAATTT
TTT
RUNX1 1-15del cr622 evopreQ1
(SEQ ID NO: 274)
GCATTTTCAGGAGGAAGCGAGTTTAAGAGCTAAGCTGGAAACAGCATAGC
AAGTTTAAATAAGGCTAGTCCGTTATCAGCTGGAAACAGCGGCACCGAGT
CGGTGCTTACGAAGGAAATGACTCAAATATGCCTTCCTCCTGAAAATAAC
TCTCTTTGACGCGGTTCTATCTAGTTACGCGTTAAACCAACTAGAAATTT
TTT
RUNX1 1-15del cr772 evopreQ1
(SEQ ID NO: 275)
GCATTTTCAGGAGGAAGCGAGTTTAAGAGCTAAGCTGGAAACAGCATAGC
AAGTTTAAATAAGGCTAGTCCGTTATCAACTCGAAAGAGTGGCACCGAGT
CGGTGCTTACGAAGGAAATGACTCAAATATGCCTTCCTCCTGAAAATAAC
TCTCTTTGACGCGGTTCTATCTAGTTACGCGTTAAACCAACTAGAAATTT
TTT
RUNX1 1-15del cr532 evopreQ1
(SEQ ID NO: 276)
GCATTTTCAGGAGGAAGCGAGTTTAAGAGCTAAGCTGGAAACAGCATAGC
AAGTTTAAATAAGGCTAGTCCGTTATCAACGTGAAAACGTGACTCCGAGT
CGGAGTTTACGAAGGAAATGACTCAAATATGCCTTCCTCCTGAAAATAAC
TCTCTTTGACGCGGTTCTATCTAGTTACGCGTTAAACCAACTAGAAATTT
TTT
RUNX1 1-15del cr961 evopreQ1
(SEQ ID NO: 277)
GCATTTTCAGGAGGAAGCGAGTTTAAGAGCTAAGCTGGAAACAGCATAGC
AAGTTTAAATAAGGCTAGTCCGTTATCAACTCGAAAGAGTGCAACCGAGT
CGGTTGTTACGAAGGAAATGACTCAAATATGCCTTCCTCCTGAAAATAAC
TCTCTTTGACGCGGTTCTATCTAGTTACGCGTTAAACCAACTAGAAATTT
TTT
RUNX1 1-15del flip and extension
scaffold evopreQ1
(SEQ ID NO: 278)
GCATTTTCAGGAGGAAGCGAGTTTAAGAGCTAAGCTGGAAACAGCATAGC
AAGTTTAAATAAGGCTAGTCCGTTATCAACTTGAAAAAGTGGCACCGAGT
CGGTGCTTACGAAGGAAATGACTCAAATATGCCTTCCTCCTGAAAATAAC
TCTCTTTGACGCGGTTCTATCTAGTTACGCGTTAAACCAACTAGAAATTT
TTT
RUNX1 +5G-T standard scaffold
evopreQ1
(SEQ ID NO: 279)
GCATTTTCAGGAGGAAGCGAGTTTTAGAGCTAGAAATAGCAAGTTAAAAT
AAGGCTAGTCCGTTATCAACTTGAAAAAGTGGCACCGAGTCGGTGCTGTC
TGAAGCAATCGCTTCCTCCTGAAAATAACTCTCTTTGACGCGGTTCTATC
TAGTTACGCGTTAAACCAACTAGAAATTTTTT
RUNX1 +5G-T cr748 evopreQ1
(SEQ ID NO: 280)
GCATTTTCAGGAGGAAGCGAGTTTAAGAGCTAAGCTGGAAACAGCATAGC
AAGTTTAAATAAGGCTAGTCCGTTATCAACTCGAGAGAGTGGCACCGAGT
CGGTGCTTGTCTGAAGCAATCGCTTCCTCCTGAAAATAACTCTCTTTGAC
GCGGTTCTATCTAGTTACGCGTTAAACCAACTAGAAATTTTTT
RUNX1 +5G-T cr289 evopreQ1
(SEQ ID NO: 281)
GCATTTTCAGGAGGAAGCGAGTTTAAGAGCTAAGCTGGAAACAGCATAGC
AAGTTTAAATAAGGCTAGTCCGTTATCAACTGGAAACAGTGGCACCGAGT
CGGTGCTTGTCTGAAGCAATCGCTTCCTCCTGAAAATAACTCTCTTTGAC
GCGGTTCTATCTAGTTACGCGTTAAACCAACTAGAAATTTTTT
RUNX1 +5G-T cr622 evopreQ1
(SEQ ID NO: 282)
GCATTTTCAGGAGGAAGCGAGTTTAAGAGCTAAGCTGGAAACAGCATAGC
AAGTTTAAATAAGGCTAGTCCGTTATCAGCTGGAAACAGCGGCACCGAGT
CGGTGCTTGTCTGAAGCAATCGCTTCCTCCTGAAAATAACTCTCTTTGAC
GCGGTTCTATCTAGTTACGCGTTAAACCAACTAGAAATTTTTT
RUNX1 +5G-T cr772 evopreQ1
(SEQ ID NO: 283)
GCATTTTCAGGAGGAAGCGAGTTTAAGAGCTAAGCTGGAAACAGCATAGC
AAGTTTAAATAAGGCTAGTCCGTTATCAACTCGAAAGAGTGGCACCGAGT
CGGTGCTTGTCTGAAGCAATCGCTTCCTCCTGAAAATAACTCTCTTTGAC
GCGGTTCTATCTAGTTACGCGTTAAACCAACTAGAAATTTTTT
RUNX1 +5G-T cr532 evopreQ1
(SEQ ID NO: 284)
GCATTTTCAGGAGGAAGCGAGTTTAAGAGCTAAGCTGGAAACAGCATAGC
AAGTTTAAATAAGGCTAGTCCGTTATCAACGTGAAAACGTGACTCCGAGT
CGGAGTTTGTCTGAAGCAATCGCTTCCTCCTGAAAATAACTCTCTTTGAC
GCGGTTCTATCTAGTTACGCGTTAAACCAACTAGAAATTTTTT
RUNX1 +5G-T cr961 evopreQ1
(SEQ ID NO: 285)
GCATTTTCAGGAGGAAGCGAGTTTAAGAGCTAAGCTGGAAACAGCATAGC
AAGTTTAAATAAGGCTAGTCCGTTATCAACTCGAAAGAGTGCAACCGAGT
CGGTTGTTGTCTGAAGCAATCGCTTCCTCCTGAAAATAACTCTCTTTGAC
GCGGTTCTATCTAGTTACGCGTTAAACCAACTAGAAATTTTTT
RUNX1 +5G-T flip and extension
scaffold evopreQ1
(SEQ ID NO: 286)
GCATTTTCAGGAGGAAGCGAGTTTAAGAGCTAAGCTGGAAACAGCATAGC
AAGTTTAAATAAGGCTAGTCCGTTATCAACTTGAAAAAGTGGCACCGAGT
CGGTGCTTGTCTGAAGCAATCGCTTCCTCCTGAAAATAACTCTCTTTGAC
GCGGTTCTATCTAGTTACGCGTTAAACCAACTAGAAATTTTTT
DNMT1 1-15del standard scaffold
evopreQ1
(SEQ ID NO: 287)
GATTCCTGGTGCCAGAAACAGTTTTAGAGCTAGAAATAGCAAGTTAAAAT
AAGGCTAGTCCGTTATCAACTTGAAAAAGTGGCACCGAGTCGGTGCTGCT
AAGGACTAGTTCTGCCCTTCTGGCACCAGGACCTCTTCTTTGACGCGGTT
CTATCTAGTTACGCGTTAAACCAACTAGAAATTTTTT
DNMT1 1-15del cr748 evopreQ1
(SEQ ID NO: 288)
GATTCCTGGTGCCAGAAACAGTTTAAGAGCTAAGCTGGAAACAGCATAGC
AAGTTTAAATAAGGCTAGTCCGTTATCAACTCGAGAGAGTGGCACCGAGT
CGGTGCTTGCTAAGGACTAGTTCTGCCCTTCTGGCACCAGGACCTCTTCT
TTGACGCGGTTCTATCTAGTTACGCGTTAAACCAACTAGAAATTTTTT
DNMT1 1-15del cr289 evopreQ1
(SEQ ID NO: 289)
GATTCCTGGTGCCAGAAACAGTTTAAGAGCTAAGCTGGAAACAGCATAGC
AAGTTTAAATAAGGCTAGTCCGTTATCAACTGGAAACAGTGGCACCGAGT
CGGTGCTTGCTAAGGACTAGTTCTGCCCTTCTGGCACCAGGACCTCTTCT
TTGACGCGGTTCTATCTAGTTACGCGTTAAACCAACTAGAAATTTTTT
DNMT1 1-15del cr622 evopreQ1
(SEQ ID NO: 290)
GATTCCTGGTGCCAGAAACAGTTTAAGAGCTAAGCTGGAAACAGCATAGC
AAGTTTAAATAAGGCTAGTCCGTTATCAGCTGGAAACAGCGGCACCGAGT
CGGTGCTTGCTAAGGACTAGTTCTGCCCTTCTGGCACCAGGACCTCTTCT
TTGACGCGGTTCTATCTAGTTACGCGTTAAACCAACTAGAAATTTTTT
DNMT1 1-15del cr772 evopreQ1
(SEQ ID NO: 291)
GATTCCTGGTGCCAGAAACAGTTTAAGAGCTAAGCTGGAAACAGCATAGC
AAGTTTAAATAAGGCTAGTCCGTTATCAACTCGAAAGAGTGGCACCGAGT
CGGTGCTTGCTAAGGACTAGTTCTGCCCTTCTGGCACCAGGACCTCTTCT
TTGACGCGGTTCTATCTAGTTACGCGTTAAACCAACTAGAAATTTTTT
DNMT1 1-15del cr532 evopreQ1
(SEQ ID NO: 292)
GATTCCTGGTGCCAGAAACAGTTTAAGAGCTAAGCTGGAAACAGCATAGC
AAGTTTAAATAAGGCTAGTCCGTTATCAACGTGAAAACGTGACTCCGAGT
CGGAGTTTGCTAAGGACTAGTTCTGCCCTTCTGGCACCAGGACCTCTTCT
TTGACGCGGTTCTATCTAGTTACGCGTTAAACCAACTAGAAATTTTTT
DNMT1 1-15del cr961 evopreQ1
(SEQ ID NO: 293)
GATTCCTGGTGCCAGAAACAGTTTAAGAGCTAAGCTGGAAACAGCATAGC
AAGTTTAAATAAGGCTAGTCCGTTATCAACTCGAAAGAGTGCAACCGAGT
CGGTTGTTGCTAAGGACTAGTTCTGCCCTTCTGGCACCAGGACCTCTTCT
TTGACGCGGTTCTATCTAGTTACGCGTTAAACCAACTAGAAATTTTTT
DNMT1 1-15del flip and extension
scaffold evopreQ1
(SEQ ID NO: 294)
GATTCCTGGTGCCAGAAACAGTTTAAGAGCTAAGCTGGAAACAGCATAGC
AAGTTTAAATAAGGCTAGTCCGTTATCAACTTGAAAAAGTGGCACCGAGT
CGGTGCTTGCTAAGGACTAGTTCTGCCCTTCTGGCACCAGGACCTCTTCT
TTGACGCGGTTCTATCTAGTTACGCGTTAAACCAACTAGAAATTTTTT
DNMT1 +5 G--T standard scaffold evopreQ1
(SEQ ID NO: 295)
GATTCCTGGTGCCAGAAACAGTTTTAGAGCTAGAAATAGCAAGTTAAAAT
AAGGCTAGTCCGTTATCAACTTGAAAAAGTGGCACCGAGTCGGTGCGTCA
CCACTGTTTCTGGCACCAGGACCTCTTCTTTGACGCGGTTCTATCTAGTT
ACGCGTTAAACCAACTAGAAATTTTTT
DNMT1 +5 G--T cr748 evopreQ1
(SEQ ID NO: 296)
GATTCCTGGTGCCAGAAACAGTTTAAGAGCTAAGCTGGAAACAGCATAGC
AAGTTTAAATAAGGCTAGTCCGTTATCAACTCGAGAGAGTGGCACCGAGT
CGGTGCTGTCACCACTGTTTCTGGCACCAGGACCTCTTCTTTGACGCGGT
TCTATCTAGTTACGCGTTAAACCAACTAGAAATTTTTT
DNMT1 +5 G--T cr289 evopreQ1
(SEQ ID NO: 297)
GATTCCTGGTGCCAGAAACAGTTTAAGAGCTAAGCTGGAAACAGCATAGC
AAGTTTAAATAAGGCTAGTCCGTTATCAACTGGAAACAGTGGCACCGAGT
CGGTGCTGTCACCACTGTTTCTGGCACCAGGACCTCTTCTTTGACGCGGT
TCTATCTAGTTACGCGTTAAACCAACTAGAAATTTTTT
DNMT1 +5 G--T cr622 evopreQ1
(SEQ ID NO: 298)
GATTCCTGGTGCCAGAAACAGTTTAAGAGCTAAGCTGGAAACAGCATAGC
AAGTTTAAATAAGGCTAGTCCGTTATCAGCTGGAAACAGCGGCACCGAGT
CGGTGCTGTCACCACTGTTTCTGGCACCAGGACCTCTTCTTTGACGCGGT
TCTATCTAGTTACGCGTTAAACCAACTAGAAATTTTTT
DNMT1 +5 G--T cr772 evopreQ1
(SEQ ID NO: 299)
GATTCCTGGTGCCAGAAACAGTTTAAGAGCTAAGCTGGAAACAGCATAGC
AAGTTTAAATAAGGCTAGTCCGTTATCAACTCGAAAGAGTGGCACCGAGT
CGGTGCTGTCACCACTGTTTCTGGCACCAGGACCTCTTCTTTGACGCGGT
TCTATCTAGTTACGCGTTAAACCAACTAGAAATTTTTT
DNMT1 +5 G--T cr532 evopreQ1
(SEQ ID NO: 300)
GATTCCTGGTGCCAGAAACAGTTTAAGAGCTAAGCTGGAAACAGCATAGC
AAGTTTAAATAAGGCTAGTCCGTTATCAACGTGAAAACGTGACTCCGAGT
CGGAGTTGTCACCACTGTTTCTGGCACCAGGACCTCTTCTTTGACGCGGT
TCTATCTAGTTACGCGTTAAACCAACTAGAAATTTTTT
DNMT1 +5 G--T cr961 evopreQ1
(SEQ ID NO: 301)
GATTCCTGGTGCCAGAAACAGTTTAAGAGCTAAGCTGGAAACAGCATAGC
AAGTTTAAATAAGGCTAGTCCGTTATCAACTCGAAAGAGTGCAACCGAGT
CGGTTGTGTCACCACTGTTTCTGGCACCAGGACCTCTTCTTTGACGCGGT
TCTATCTAGTTACGCGTTAAACCAACTAGAAATTTTTT
DNMT1 +5 G--T flip and extension
scaffold evopreQ1
(SEQ ID NO: 302)
GATTCCTGGTGCCAGAAACAGTTTAAGAGCTAAGCTGGAAACAGCATAGC
AAGTTTAAATAAGGCTAGTCCGTTATCAACTTGAAAAAGTGGCACCGAGT
CGGTGCTGTCACCACTGTTTCTGGCACCAGGACCTCTTCTTTGACGCGGT
TCTATCTAGTTACGCGTTAAACCAACTAGAAATTTTTT
FANCF 1-15del standard scaffold
evopreQ1
(SEQ ID NO: 303)
GGAATCCCTTCTGCAGCACCGTTTTAGAGCTAGAAATAGCAAGTTAAAAT
AAGGCTAGTCCGTTATCAACTTGAAAAAGTGGCACCGAGTCGGTGCTAGT
GCTTGAGACCGCCAGAAGCTCGGGCTGCAGAAGGGACAATCACTTTGACG
CGGTTCTATCTAGTTACGCGTTAAACCAACTAGAAATTTTTT
FANCF 1-15del cr748 evopreQ1
(SEQ ID NO: 304)
GGAATCCCTTCTGCAGCACCGTTTAAGAGCTAAGCTGGAAACAGCATAGC
AAGTTTAAATAAGGCTAGTCCGTTATCAACTCGAGAGAGTGGCACCGAGT
CGGTGCTTAGTGCTTGAGACCGCCAGAAGCTCGGGCTGCAGAAGGGACAA
TCACTTTGACGCGGTTCTATCTAGTTACGCGTTAAACCAACTAGAAATTT
TTT
FANCF 1-15del cr289 evopreQ1
(SEQ ID NO: 305)
GGAATCCCTTCTGCAGCACCGTTTAAGAGCTAAGCTGGAAACAGCATAGC
AAGTTTAAATAAGGCTAGTCCGTTATCAACTGGAAACAGTGGCACCGAGT
CGGTGCTTAGTGCTTGAGACCGCCAGAAGCTCGGGCTGCAGAAGGGACAA
TCACTTTGACGCGGTTCTATCTAGTTACGCGTTAAACCAACTAGAAATTT
TTT
FANCF 1-15del cr622 evopreQ1
(SEQ ID NO: 306)
GGAATCCCTTCTGCAGCACCGTTTAAGAGCTAAGCTGGAAACAGCATAGC
AAGTTTAAATAAGGCTAGTCCGTTATCAGCTGGAAACAGCGGCACCGAGT
CGGTGCTTAGTGCTTGAGACCGCCAGAAGCTCGGGCTGCAGAAGGGACAA
TCACTTTGACGCGGTTCTATCTAGTTACGCGTTAAACCAACTAGAAATTT
TTT
FANCF 1-15del cr772 evopreQ1
(SEQ ID NO: 307)
GGAATCCCTTCTGCAGCACCGTTTAAGAGCTAAGCTGGAAACAGCATAGC
AAGTTTAAATAAGGCTAGTCCGTTATCAACTCGAAAGAGTGGCACCGAGT
CGGTGCTTAGTGCTTGAGACCGCCAGAAGCTCGGGCTGCAGAAGGGACAA
TCACTTTGACGCGGTTCTATCTAGTTACGCGTTAAACCAACTAGAAATTT
TTT
FANCF 1-15del cr532 evopreQ1
(SEQ ID NO: 308)
GGAATCCCTTCTGCAGCACCGTTTAAGAGCTAAGCTGGAAACAGCATAGC
AAGTTTAAATAAGGCTAGTCCGTTATCAACGTGAAAACGTGACTCCGAGT
CGGAGTTTAGTGCTTGAGACCGCCAGAAGCTCGGGCTGCAGAAGGGACAA
TCACTTTGACGCGGTTCTATCTAGTTACGCGTTAAACCAACTAGAAATTT
TTT
FANCF 1-15del cr961 evopreQ1
(SEQ ID NO: 309)
GGAATCCCTTCTGCAGCACCGTTTAAGAGCTAAGCTGGAAACAGCATAGC
AAGTTTAAATAAGGCTAGTCCGTTATCAACTCGAAAGAGTGCAACCGAGT
CGGTTGTTAGTGCTTGAGACCGCCAGAAGCTCGGGCTGCAGAAGGGACAA
TCACTTTGACGCGGTTCTATCTAGTTACGCGTTAAACCAACTAGAAATTT
TTT
FANCF 1-15del flip and extension
scaffold evopreQ1
(SEQ ID NO: 310)
GGAATCCCTTCTGCAGCACCGTTTAAGAGCTAAGCTGGAAACAGCATAGC
AAGTTTAAATAAGGCTAGTCCGTTATCAACTTGAAAAAGTGGCACCGAGT
CGGTGCTTAGTGCTTGAGACCGCCAGAAGCTCGGGCTGCAGAAGGGACAA
TCACTTTGACGCGGTTCTATCTAGTTACGCGTTAAACCAACTAGAAATTT
TTT
FANCF +5 G--T cr748 evopreQ1
(SEQ ID NO: 311)
GGAATCCCTTCTGCAGCACCGTTTAAGAGCTAAGCTGGAAACAGCATAGC
AAGTTTAAATAAGGCTAGTCCGTTATCAACTCGAGAGAGTGGCACCGAGT
CGGTGCTGGAAAAGCGATCAAGGTGCTGCAGAAGGGACAATCACTTTGAC
GCGGTTCTATCTAGTTACGCGTTAAACCAACTAGAAATTTTTT
FANCF +5 G--T cr289 evopreQ1
(SEQ ID NO: 312)
GGAATCCCTTCTGCAGCACCGTTTAAGAGCTAAGCTGGAAACAGCATAGC
AAGTTTAAATAAGGCTAGTCCGTTATCAACTGGAAACAGTGGCACCGAGT
CGGTGCTGGAAAAGCGATCAAGGTGCTGCAGAAGGGACAATCACTTTGAC
GCGGTTCTATCTAGTTACGCGTTAAACCAACTAGAAATTTTTT
FANCF +5 G--T cr622 evopreQ1
(SEQ ID NO: 313)
GGAATCCCTTCTGCAGCACCGTTTAAGAGCTAAGCTGGAAACAGCATAGC
AAGTTTAAATAAGGCTAGTCCGTTATCAGCTGGAAACAGCGGCACCGAGT
CGGTGCTGGAAAAGCGATCAAGGTGCTGCAGAAGGGACAATCACTTTGAC
GCGGTTCTATCTAGTTACGCGTTAAACCAACTAGAAATTTTTT
FANCF +5 G--T cr772 evopreQ1
(SEQ ID NO: 314)
GGAATCCCTTCTGCAGCACCGTTTAAGAGCTAAGCTGGAAACAGCATAGC
AAGTTTAAATAAGGCTAGTCCGTTATCAACTCGAAAGAGTGGCACCGAGT
CGGTGCTGGAAAAGCGATCAAGGTGCTGCAGAAGGGACAATCACTTTGAC
GCGGTTCTATCTAGTTACGCGTTAAACCAACTAGAAATTTTTT
FANCF +5 G--T cr532 evopreQ1
(SEQ ID NO: 315)
GGAATCCCTTCTGCAGCACCGTTTAAGAGCTAAGCTGGAAACAGCATAGC
AAGTTTAAATAAGGCTAGTCCGTTATCAACGTGAAAACGTGACTCCGAGT
CGGAGTTGGAAAAGCGATCAAGGTGCTGCAGAAGGGACAATCACTTTGAC
GCGGTTCTATCTAGTTACGCGTTAAACCAACTAGAAATTTTTT
FANCF +5 G--T cr961 evopreQ1
(SEQ ID NO: 316)
GGAATCCCTTCTGCAGCACCGTTTAAGAGCTAAGCTGGAAACAGCATAGC
AAGTTTAAATAAGGCTAGTCCGTTATCAACTCGAAAGAGTGCAACCGAGT
CGGTTGTGGAAAAGCGATCAAGGTGCTGCAGAAGGGACAATCACTTTGAC
GCGGTTCTATCTAGTTACGCGTTAAACCAACTAGAAATTTTTT
FANCF +5 G--T flip and extension
scaffold evopreQ1
(SEQ ID NO: 317)
GGAATCCCTTCTGCAGCACCGTTTAAGAGCTAAGCTGGAAACAGCATAGC
AAGTTTAAATAAGGCTAGTCCGTTATCAACTTGAAAAAGTGGCACCGAGT
CGGTGCTGGAAAAGCGATCAAGGTGCTGCAGAAGGGACAATCACTTTGAC
GCGGTTCTATCTAGTTACGCGTTAAACCAACTAGAAATTTTTT
EMX1 1-15del standard scaffold
evopreQ1
(SEQ ID NO: 318)
GAGTCCGAGCAGAAGAAGAAGTTTTAGAGCTAGAAATAGCAAGTTAAAAT
AAGGCTAGTCCGTTATCAACTTGAAAAAGTGGCACCGAGTCGGTGCTCGT
GGCAATGCGCCACCGGTTGATGTTCTTCTGCTCGGAAACAATCTTTGACG
CGGTTCTATCTAGTTACGCGTTAAACCAACTAGAAATTTTTT
EMX1 1-15del cr748 evopreQ1
(SEQ ID NO: 319)
GAGTCCGAGCAGAAGAAGAAGTTTAAGAGCTAAGCTGGAAACAGCATAGC
AAGTTTAAATAAGGCTAGTCCGTTATCAACTCGAGAGAGTGGCACCGAGT
CGGTGCTTCGTGGCAATGCGCCACCGGTTGATGTTCTTCTGCTCGGAAAC
AATCTTTGACGCGGTTCTATCTAGTTACGCGTTAAACCAACTAGAAATTT
TTT
EMX1 1-15del cr289 evopreQ1
(SEQ ID NO: 320)
GAGTCCGAGCAGAAGAAGAAGTTTAAGAGCTAAGCTGGAAACAGCATAGC
AAGTTTAAATAAGGCTAGTCCGTTATCAACTGGAAACAGTGGCACCGAGT
CGGTGCTTCGTGGCAATGCGCCACCGGTTGATGTTCTTCTGCTCGGAAAC
AATCTTTGACGCGGTTCTATCTAGTTACGCGTTAAACCAACTAGAAATTT
TTT
EMX1 1-15del cr622 evopreQ1
(SEQ ID NO: 321)
GAGTCCGAGCAGAAGAAGAAGTTTAAGAGCTAAGCTGGAAACAGCATAGC
AAGTTTAAATAAGGCTAGTCCGTTATCAGCTGGAAACAGCGGCACCGAGT
CGGTGCTTCGTGGCAATGCGCCACCGGTTGATGTTCTTCTGCTCGGAAAC
AATCTTTGACGCGGTTCTATCTAGTTACGCGTTAAACCAACTAGAAATTT
TTT
EMX1 1-15del cr772 evopreQ1
(SEQ ID NO: 322)
GAGTCCGAGCAGAAGAAGAAGTTTAAGAGCTAAGCTGGAAACAGCATAGC
AAGTTTAAATAAGGCTAGTCCGTTATCAACTCGAAAGAGTGGCACCGAGT
CGGTGCTTCGTGGCAATGCGCCACCGGTTGATGTTCTTCTGCTCGGAAAC
AATCTTTGACGCGGTTCTATCTAGTTACGCGTTAAACCAACTAGAAATTT
TTT
EMX1 1-15del cr532 evopreQ1
(SEQ ID NO: 323)
GAGTCCGAGCAGAAGAAGAAGTTTAAGAGCTAAGCTGGAAACAGCATAGC
AAGTTTAAATAAGGCTAGTCCGTTATCAACGTGAAAACGTGACTCCGAGT
CGGAGTTTCGTGGCAATGCGCCACCGGTTGATGTTCTTCTGCTCGGAAAC
AATCTTTGACGCGGTTCTATCTAGTTACGCGTTAAACCAACTAGAAATTT
TTT
EMX1 1-15del cr961 evopreQ1
(SEQ ID NO: 324)
GAGTCCGAGCAGAAGAAGAAGTTTAAGAGCTAAGCTGGAAACAGCATAGC
AAGTTTAAATAAGGCTAGTCCGTTATCAACTCGAAAGAGTGCAACCGAGT
CGGTTGTTCGTGGCAATGCGCCACCGGTTGATGTTCTTCTGCTCGGAAAC
AATCTTTGACGCGGTTCTATCTAGTTACGCGTTAAACCAACTAGAAATTT
TTT
EMX1 1-15del flip and extension
scaffold evopreQ1
(SEQ ID NO: 325)
GAGTCCGAGCAGAAGAAGAAGTTTAAGAGCTAAGCTGGAAACAGCATAGC
AAGTTTAAATAAGGCTAGTCCGTTATCAACTTGAAAAAGTGGCACCGAGT
CGGTGCTTCGTGGCAATGCGCCACCGGTTGATGTTCTTCTGCTCGGAAAC
AATCTTTGACGCGGTTCTATCTAGTTACGCGTTAAACCAACTAGAAATTT
TTT
EMX1 +5 G--T standard scaffold
evopreQ1
(SEQ ID NO: 326)
GAGTCCGAGCAGAAGAAGAAGTTTTAGAGCTAGAAATAGCAAGTTAAAAT
AAGGCTAGTCCGTTATCAACTTGAAAAAGTGGCACCGAGTCGGTGCGTGA
TGGGAGCACTTCTTCTTCTGCTCGGAAACAATCTTTGACGCGGTTCTATC
TAGTTACGCGTTAAACCAACTAGAAATTTTTT
EMX1 +5 G--T cr748 evopreQ1
(SEQ ID NO: 327)
GAGTCCGAGCAGAAGAAGAAGTTTAAGAGCTAAGCTGGAAACAGCATAGC
AAGTTTAAATAAGGCTAGTCCGTTATCAACTCGAGAGAGTGGCACCGAGT
CGGTGCTGTGATGGGAGCACTTCTTCTTCTGCTCGGAAACAATCTTTGAC
GCGGTTCTATCTAGTTACGCGTTAAACCAACTAGAAATTTTTT
EMX1 +5 G--T cr289 evopreQ1
(SEQ ID NO: 328)
GAGTCCGAGCAGAAGAAGAAGTTTAAGAGCTAAGCTGGAAACAGCATAGC
AAGTTTAAATAAGGCTAGTCCGTTATCAACTGGAAACAGTGGCACCGAGT
CGGTGCTGTGATGGGAGCACTTCTTCTTCTGCTCGGAAACAATCTTTGAC
GCGGTTCTATCTAGTTACGCGTTAAACCAACTAGAAATTTTTT
EMX1 +5 G--T cr622 evopreQ1
(SEQ ID NO: 329)
GAGTCCGAGCAGAAGAAGAAGTTTAAGAGCTAAGCTGGAAACAGCATAGC
AAGTTTAAATAAGGCTAGTCCGTTATCAGCTGGAAACAGCGGCACCGAGT
CGGTGCTGTGATGGGAGCACTTCTTCTTCTGCTCGGAAACAATCTTTGAC
GCGGTTCTATCTAGTTACGCGTTAAACCAACTAGAAATTTTTT
EMX1 +5 G--T cr772 evopreQ1
(SEQ ID NO: 330)
GAGTCCGAGCAGAAGAAGAAGTTTAAGAGCTAAGCTGGAAACAGCATAGC
AAGTTTAAATAAGGCTAGTCCGTTATCAACTCGAAAGAGTGGCACCGAGT
CGGTGCTGTGATGGGAGCACTTCTTCTTCTGCTCGGAAACAATCTTTGAC
GCGGTTCTATCTAGTTACGCGTTAAACCAACTAGAAATTTTTT
EMX1 +5 G--T cr532 evopreQ1
(SEQ ID NO: 331)
GAGTCCGAGCAGAAGAAGAAGTTTAAGAGCTAAGCTGGAAACAGCATAGC
AAGTTTAAATAAGGCTAGTCCGTTATCAACGTGAAAACGTGACTCCGAGT
CGGAGTTGTGATGGGAGCACTTCTTCTTCTGCTCGGAAACAATCTTTGAC
GCGGTTCTATCTAGTTACGCGTTAAACCAACTAGAAATTTTTT
EMX1 +5 G--T cr961 evopreQ1
(SEQ ID NO: 332)
GAGTCCGAGCAGAAGAAGAAGTTTAAGAGCTAAGCTGGAAACAGCATAGC
AAGTTTAAATAAGGCTAGTCCGTTATCAACTCGAAAGAGTGCAACCGAGT
CGGTTGTGTGATGGGAGCACTTCTTCTTCTGCTCGGAAACAATCTTTGAC
GCGGTTCTATCTAGTTACGCGTTAAACCAACTAGAAATTTTTT
EMX1 +5 G--T flip and extension
scaffold evopreQ1
(SEQ ID NO: 333)
GAGTCCGAGCAGAAGAAGAAGTTTAAGAGCTAAGCTGGAAACAGCATAGC
AAGTTTAAATAAGGCTAGTCCGTTATCAACTTGAAAAAGTGGCACCGAGT
CGGTGCTGTGATGGGAGCACTTCTTCTTCTGCTCGGAAACAATCTTTGAC
GCGGTTCTATCTAGTTACGCGTTAAACCAACTAGAAATTTTTT
RNF2 +1FLAG standard scaffold
evopreQ1
(SEQ ID NO: 334)
GTCATCTTAGTCATTACCTGGTTTTAGAGCTAGAAATAGCAAGTTAAAAT
AAGGCTAGTCCGTTATCAACTTGAAAAAGTGGCACCGAGTCGGTGCTGAG
TTACAACGAACACCTCAGCTTATCGTCGTCATCCTTGTAATCGTAATGAC
TAAGATGTCATCTCTTTGACGCGGTTCTATCTAGTTACGCGTTAAACCAA
CTAGAAATTTTTT
RNF2 +1FLAG cr748 evopreQ1
(SEQ ID NO: 335)
GTCATCTTAGTCATTACCTGGTTTAAGAGCTAAGCTGGAAACAGCATAGC
AAGTTTAAATAAGGCTAGTCCGTTATCAACTCGAGAGAGTGGCACCGAGT
CGGTGCTTGAGTTACAACGAACACCTCAGCTTATCGTCGTCATCCTTGTA
ATCGTAATGACTAAGATGTCATCTCTTTGACGCGGTTCTATCTAGTTACG
CGTTAAACCAACTAGAAATTTTTT
RNF2 +1FLAG cr289 evopreQ1
(SEQ ID NO: 336)
GTCATCTTAGTCATTACCTGGTTTAAGAGCTAAGCTGGAAACAGCATAGC
AAGTTTAAATAAGGCTAGTCCGTTATCAACTGGAAACAGTGGCACCGAGT
CGGTGCTTGAGTTACAACGAACACCTCAGCTTATCGTCGTCATCCTTGTA
ATCGTAATGACTAAGATGTCATCTCTTTGACGCGGTTCTATCTAGTTACG
CGTTAAACCAACTAGAAATTTTTT
RNF2 +1FLAG cr622 evopreQ1
(SEQ ID NO: 337)
GTCATCTTAGTCATTACCTGGTTTAAGAGCTAAGCTGGAAACAGCATAGC
AAGTTTAAATAAGGCTAGTCCGTTATCAGCTGGAAACAGCGGCACCGAGT
CGGTGCTTGAGTTACAACGAACACCTCAGCTTATCGTCGTCATCCTTGTA
ATCGTAATGACTAAGATGTCATCTCTTTGACGCGGTTCTATCTAGTTACG
CGTTAAACCAACTAGAAATTTTTT
RNF2 +1FLAG cr772 evopreQ1
(SEQ ID NO: 338)
GTCATCTTAGTCATTACCTGGTTTAAGAGCTAAGCTGGAAACAGCATAGC
AAGTTTAAATAAGGCTAGTCCGTTATCAACTCGAAAGAGTGGCACCGAGT
CGGTGCTTGAGTTACAACGAACACCTCAGCTTATCGTCGTCATCCTTGTA
ATCGTAATGACTAAGATGTCATCTCTTTGACGCGGTTCTATCTAGTTACG
CGTTAAACCAACTAGAAATTTTTT
RNF2 +1FLAG cr532 evopreQ1
(SEQ ID NO: 339)
GTCATCTTAGTCATTACCTGGTTTAAGAGCTAAGCTGGAAACAGCATAGC
AAGTTTAAATAAGGCTAGTCCGTTATCAACGTGAAAACGTGACTCCGAGT
CGGAGTTTGAGTTACAACGAACACCTCAGCTTATCGTCGTCATCCTTGTA
ATCGTAATGACTAAGATGTCATCTCTTTGACGCGGTTCTATCTAGTTACG
CGTTAAACCAACTAGAAATTTTTT
RNF2 +1FLAG cr961 evopreQ1
(SEQ ID NO: 340)
GTCATCTTAGTCATTACCTGGTTTAAGAGCTAAGCTGGAAACAGCATAGC
AAGTTTAAATAAGGCTAGTCCGTTATCAACTCGAAAGAGTGCAACCGAGT
CGGTTGTTGAGTTACAACGAACACCTCAGCTTATCGTCGTCATCCTTGTA
ATCGTAATGACTAAGATGTCATCTCTTTGACGCGGTTCTATCTAGTTACG
CGTTAAACCAACTAGAAATTTTTT
RNF2 +1FLAG flip and extension
scaffold evopreQ1
(SEQ ID NO: 341)
GTCATCTTAGTCATTACCTGGTTTAAGAGCTAAGCTGGAAACAGCATAGC
AAGTTTAAATAAGGCTAGTCCGTTATCAACTTGAAAAAGTGGCACCGAGT
CGGTGCTTGAGTTACAACGAACACCTCAGCTTATCGTCGTCATCCTTGTA
ATCGTAATGACTAAGATGTCATCTCTTTGACGCGGTTCTATCTAGTTACG
CGTTAAACCAACTAGAAATTTTTT
VEGFA +5 G--T cr748 evopreQ1
(SEQ ID NO: 342)
GATGTCTGCAGGCCAGATGAGTTTAAGAGCTAAGCTGGAAACAGCATAGC
AAGTTTAAATAAGGCTAGTCCGTTATCAACTCGAGAGAGTGGCACCGAGT
CGGTGCTAATGTGCCATCTGGAGCACTCATCTGGCCTGCAGAACAATCTC
TTGACGCGGTTCTATCTAGTTACGCGTTAAACCAACTAGAAATTTTTT
VEGFA +5 G--T cr289 evopreQ1
(SEQ ID NO: 343)
GATGTCTGCAGGCCAGATGAGTTTAAGAGCTAAGCTGGAAACAGCATAGC
AAGTTTAAATAAGGCTAGTCCGTTATCAACTGGAAACAGTGGCACCGAGT
CGGTGCTAATGTGCCATCTGGAGCACTCATCTGGCCTGCAGAACAATCTC
TTGACGCGGTTCTATCTAGTTACGCGTTAAACCAACTAGAAATTTTTT
VEGFA +5 G--T cr622 evopreQ1
(SEQ ID NO: 344)
GATGTCTGCAGGCCAGATGAGTTTAAGAGCTAAGCTGGAAACAGCATAGC
AAGTTTAAATAAGGCTAGTCCGTTATCAGCTGGAAACAGCGGCACCGAGT
CGGTGCTAATGTGCCATCTGGAGCACTCATCTGGCCTGCAGAACAATCTC
TTGACGCGGTTCTATCTAGTTACGCGTTAAACCAACTAGAAATTTTTT
VEGFA +5 G--T cr772 evopreQ1
(SEQ ID NO: 345)
GATGTCTGCAGGCCAGATGAGTTTAAGAGCTAAGCTGGAAACAGCATAGC
AAGTTTAAATAAGGCTAGTCCGTTATCAACTCGAAAGAGTGGCACCGAGT
CGGTGCTAATGTGCCATCTGGAGCACTCATCTGGCCTGCAGAACAATCTC
TTGACGCGGTTCTATCTAGTTACGCGTTAAACCAACTAGAAATTTTTT
VEGFA +5 G--T cr532 evopreQ1
(SEQ ID NO: 346)
GATGTCTGCAGGCCAGATGAGTTTAAGAGCTAAGCTGGAAACAGCATAGC
AAGTTTAAATAAGGCTAGTCCGTTATCAACGTGAAAACGTGACTCCGAGT
CGGAGTTAATGTGCCATCTGGAGCACTCATCTGGCCTGCAGAACAATCTC
TTGACGCGGTTCTATCTAGTTACGCGTTAAACCAACTAGAAATTTTTT
VEGFA +5 G--T cr961 evopreQ1
(SEQ ID NO: 347)
GATGTCTGCAGGCCAGATGAGTTTAAGAGCTAAGCTGGAAACAGCATAGC
AAGTTTAAATAAGGCTAGTCCGTTATCAACTCGAAAGAGTGCAACCGAGT
CGGTTGTAATGTGCCATCTGGAGCACTCATCTGGCCTGCAGAACAATCTC
TTGACGCGGTTCTATCTAGTTACGCGTTAAACCAACTAGAAATTTTTT
VEGFA +5 G--T flip and extension
scaffold evopreQ1
(SEQ ID NO: 348)
GATGTCTGCAGGCCAGATGAGTTTAAGAGCTAAGCTGGAAACAGCATAGC
AAGTTTAAATAAGGCTAGTCCGTTATCAACTTGAAAAAGTGGCACCGAGT
CGGTGCTAATGTGCCATCTGGAGCACTCATCTGGCCTGCAGAACAATCTC
TTGACGCGGTTCTATCTAGTTACGCGTTAAACCAACTAGAAATTTTTT
VEGFA +1FLAG standard scaffold
evopreQ1
(SEQ ID NO: 349)
GATGTCTGCAGGCCAGATGAGTTTTAGAGCTAGAAATAGCAAGTTAAAAT
AAGGCTAGTCCGTTATCAACTTGAAAAAGTGGCACCGAGTCGGTGCAATG
TGCCATCTGGAGCACTCACTTATCGTCGTCATCCTTGTAATCTCTGGCCT
GCAGAACAATCTCTTGACGCGGTTCTATCTAGTTACGCGTTAAACCAACT
AGAAATTTTTT
VEGFA +1FLAG cr748 evopreQ1
(SEQ ID NO: 350)
GATGTCTGCAGGCCAGATGAGTTTAAGAGCTAAGCTGGAAACAGCATAGC
AAGTTTAAATAAGGCTAGTCCGTTATCAACTCGAGAGAGTGGCACCGAGT
CGGTGCTAATGTGCCATCTGGAGCACTCACTTATCGTCGTCATCCTTGTA
ATCTCTGGCCTGCAGAACAATCTCTTGACGCGGTTCTATCTAGTTACGCG
TTAAACCAACTAGAAATTTTTT
VEGFA +1FLAG cr289 evopreQ1
(SEQ ID NO: 351)
GATGTCTGCAGGCCAGATGAGTTTAAGAGCTAAGCTGGAAACAGCATAGC
AAGTTTAAATAAGGCTAGTCCGTTATCAACTGGAAACAGTGGCACCGAGT
CGGTGCTAATGTGCCATCTGGAGCACTCACTTATCGTCGTCATCCTTGTA
ATCTCTGGCCTGCAGAACAATCTCTTGACGCGGTTCTATCTAGTTACGCG
TTAAACCAACTAGAAATTTTTT
VEGFA +1FLAG cr622 evopreQ1
(SEQ ID NO: 352)
GATGTCTGCAGGCCAGATGAGTTTAAGAGCTAAGCTGGAAACAGCATAGC
AAGTTTAAATAAGGCTAGTCCGTTATCAGCTGGAAACAGCGGCACCGAGT
CGGTGCTAATGTGCCATCTGGAGCACTCACTTATCGTCGTCATCCTTGTA
ATCTCTGGCCTGCAGAACAATCTCTTGACGCGGTTCTATCTAGTTACGCG
TTAAACCAACTAGAAATTTTTT
VEGFA +1FLAG cr772 evopreQ1
(SEQ ID NO: 353)
GATGTCTGCAGGCCAGATGAGTTTAAGAGCTAAGCTGGAAACAGCATAGC
AAGTTTAAATAAGGCTAGTCCGTTATCAACTCGAAAGAGTGGCACCGAGT
CGGTGCTAATGTGCCATCTGGAGCACTCACTTATCGTCGTCATCCTTGTA
ATCTCTGGCCTGCAGAACAATCTCTTGACGCGGTTCTATCTAGTTACGCG
TTAAACCAACTAGAAATTTTTT
VEGFA +1FLAG cr532 evopreQ1
(SEQ ID NO: 354)
GATGTCTGCAGGCCAGATGAGTTTAAGAGCTAAGCTGGAAACAGCATAGC
AAGTTTAAATAAGGCTAGTCCGTTATCAACGTGAAAACGTGACTCCGAGT
CGGAGTTAATGTGCCATCTGGAGCACTCACTTATCGTCGTCATCCTTGTA
ATCTCTGGCCTGCAGAACAATCTCTTGACGCGGTTCTATCTAGTTACGCG
TTAAACCAACTAGAAATTTTTT
VEGFA +1FLAG cr961 evopreQ1
(SEQ ID NO: 355)
GATGTCTGCAGGCCAGATGAGTTTAAGAGCTAAGCTGGAAACAGCATAGC
AAGTTTAAATAAGGCTAGTCCGTTATCAACTCGAAAGAGTGCAACCGAGT
CGGTTGTAATGTGCCATCTGGAGCACTCACTTATCGTCGTCATCCTTGTA
ATCTCTGGCCTGCAGAACAATCTCTTGACGCGGTTCTATCTAGTTACGCG
TTAAACCAACTAGAAATTTTTT
VEGFA +1FLAG flip and extension
scaffold evopreQ1
(SEQ ID NO: 356)
GATGTCTGCAGGCCAGATGAGTTTAAGAGCTAAGCTGGAAACAGCATAGC
AAGTTTAAATAAGGCTAGTCCGTTATCAACTTGAAAAAGTGGCACCGAGT
CGGTGCTAATGTGCCATCTGGAGCACTCACTTATCGTCGTCATCCTTGTA
ATCTCTGGCCTGCAGAACAATCTCTTGACGCGGTTCTATCTAGTTACGCG
TTAAACCAACTAGAAATTTTTT
VEGFA 1-15 del standard scaffold
evopreQ1
(SEQ ID NO: 357)
GATGTCTGCAGGCCAGATGAGTTTTAGAGCTAGAAATAGCAAGTTAAAAT
AAGGCTAGTCCGTTATCAACTTGAAAAAGTGGCACCGAGTCGGTGCGTGT
GTCCCTCTGACAATGTGCTCTGGCCTGCAGAACAATCTCTTGACGCGGTT
CTATCTAGTTACGCGTTAAACCAACTAGAAATTTTTT
VEGFA 1-15 del cr748 evopreQ1
(SEQ ID NO: 358)
GATGTCTGCAGGCCAGATGAGTTTAAGAGCTAAGCTGGAAACAGCATAGC
AAGTTTAAATAAGGCTAGTCCGTTATCAACTCGAGAGAGTGGCACCGAGT
CGGTGCTGTGTGTCCCTCTGACAATGTGCTCTGGCCTGCAGAACAATCTC
TTGACGCGGTTCTATCTAGTTACGCGTTAAACCAACTAGAAATTTTTT
VEGFA 1-15 del cr289 evopreQ1
(SEQ ID NO: 359)
GATGTCTGCAGGCCAGATGAGTTTAAGAGCTAAGCTGGAAACAGCATAGC
AAGTTTAAATAAGGCTAGTCCGTTATCAACTGGAAACAGTGGCACCGAGT
CGGTGCTGTGTGTCCCTCTGACAATGTGCTCTGGCCTGCAGAACAATCTC
TTGACGCGGTTCTATCTAGTTACGCGTTAAACCAACTAGAAATTTTTT
VEGFA 1-15 del cr622 evopreQ1
(SEQ ID NO: 360)
GATGTCTGCAGGCCAGATGAGTTTAAGAGCTAAGCTGGAAACAGCATAGC
AAGTTTAAATAAGGCTAGTCCGTTATCAGCTGGAAACAGCGGCACCGAGT
CGGTGCTGTGTGTCCCTCTGACAATGTGCTCTGGCCTGCAGAACAATCTC
TTGACGCGGTTCTATCTAGTTACGCGTTAAACCAACTAGAAATTTTTT
VEGFA 1-15 del cr772 evopreQ1
(SEQ ID NO: 361)
GATGTCTGCAGGCCAGATGAGTTTAAGAGCTAAGCTGGAAACAGCATAGC
AAGTTTAAATAAGGCTAGTCCGTTATCAACTCGAAAGAGTGGCACCGAGT
CGGTGCTGTGTGTCCCTCTGACAATGTGCTCTGGCCTGCAGAACAATCTC
TTGACGCGGTTCTATCTAGTTACGCGTTAAACCAACTAGAAATTTTTT
VEGFA 1-15 del cr532 evopreQ1
(SEQ ID NO: 362)
GATGTCTGCAGGCCAGATGAGTTTAAGAGCTAAGCTGGAAACAGCATAGC
AAGTTTAAATAAGGCTAGTCCGTTATCAACGTGAAAACGTGACTCCGAGT
CGGAGTTGTGTGTCCCTCTGACAATGTGCTCTGGCCTGCAGAACAATCTC
TTGACGCGGTTCTATCTAGTTACGCGTTAAACCAACTAGAAATTTTTT
VEGFA 1-15 del cr961 evopreQ1
(SEQ ID NO: 363)
GATGTCTGCAGGCCAGATGAGTTTAAGAGCTAAGCTGGAAACAGCATAGC
AAGTTTAAATAAGGCTAGTCCGTTATCAACTCGAAAGAGTGCAACCGAGT
CGGTTGTGTGTGTCCCTCTGACAATGTGCTCTGGCCTGCAGAACAATCTC
TTGACGCGGTTCTATCTAGTTACGCGTTAAACCAACTAGAAATTTTTT
VEGFA 1-15 del flip and extension
scaffold evopreQ1
(SEQ ID NO: 364)
GATGTCTGCAGGCCAGATGAGTTTAAGAGCTAAGCTGGAAACAGCATAGC
AAGTTTAAATAAGGCTAGTCCGTTATCAACTTGAAAAAGTGGCACCGAGT
CGGTGCTGTGTGTCCCTCTGACAATGTGCTCTGGCCTGCAGAACAATCTC
TTGACGCGGTTCTATCTAGTTACGCGTTAAACCAACTAGAAATTTTTT
RUNX1 +1FLAG standard scaffold
evopreQ1
(SEQ ID NO: 365)
GCATTTTCAGGAGGAAGCGAGTTTTAGAGCTAGAAATAGCAAGTTAAAAT
AAGGCTAGTCCGTTATCAACTTGAAAAAGTGGCACCGAGTCGGTGCTGTC
TGAAGCCATCCCTTATCGTCGTCATCCTTGTAATCCTTCCTCCTGAAAAT
AACTCTCTTTGACGCGGTTCTATCTAGTTACGCGTTAAACCAACTAGAAA
TTTTTT
RUNX1 +1FLAG cr748 evopreQ1
(SEQ ID NO: 366)
GCATTTTCAGGAGGAAGCGAGTTTAAGAGCTAAGCTGGAAACAGCATAGC
AAGTTTAAATAAGGCTAGTCCGTTATCAACTCGAGAGAGTGGCACCGAGT
CGGTGCTTGTCTGAAGCCATCCCTTATCGTCGTCATCCTTGTAATCCTTC
CTCCTGAAAATAACTCTCTTTGACGCGGTTCTATCTAGTTACGCGTTAAA
CCAACTAGAAATTTTTT
RUNX1 +1FLAG cr289 evopreQ1
(SEQ ID NO: 367)
GCATTTTCAGGAGGAAGCGAGTTTAAGAGCTAAGCTGGAAACAGCATAGC
AAGTTTAAATAAGGCTAGTCCGTTATCAACTGGAAACAGTGGCACCGAGT
CGGTGCTTGTCTGAAGCCATCCCTTATCGTCGTCATCCTTGTAATCCTTC
CTCCTGAAAATAACTCTCTTTGACGCGGTTCTATCTAGTTACGCGTTAAA
CCAACTAGAAATTTTTT
RUNX1 +1FLAG cr622 evopreQ1
(SEQ ID NO: 368)
GCATTTTCAGGAGGAAGCGAGTTTAAGAGCTAAGCTGGAAACAGCATAGC
AAGTTTAAATAAGGCTAGTCCGTTATCAGCTGGAAACAGCGGCACCGAGT
CGGTGCTTGTCTGAAGCCATCCCTTATCGTCGTCATCCTTGTAATCCTTC
CTCCTGAAAATAACTCTCTTTGACGCGGTTCTATCTAGTTACGCGTTAAA
CCAACTAGAAATTTTTT
RUNX1 +1FLAG cr772 evopreQ1
(SEQ ID NO: 369)
GCATTTTCAGGAGGAAGCGAGTTTAAGAGCTAAGCTGGAAACAGCATAGC
AAGTTTAAATAAGGCTAGTCCGTTATCAACTCGAAAGAGTGGCACCGAGT
CGGTGCTTGTCTGAAGCCATCCCTTATCGTCGTCATCCTTGTAATCCTTC
CTCCTGAAAATAACTCTCTTTGACGCGGTTCTATCTAGTTACGCGTTAAA
CCAACTAGAAATTTTTT
RUNX1 +1FLAG cr532 evopreQ1
(SEQ ID NO: 370)
GCATTTTCAGGAGGAAGCGAGTTTAAGAGCTAAGCTGGAAACAGCATAGC
AAGTTTAAATAAGGCTAGTCCGTTATCAACGTGAAAACGTGACTCCGAGT
CGGAGTTTGTCTGAAGCCATCCCTTATCGTCGTCATCCTTGTAATCCTTC
CTCCTGAAAATAACTCTCTTTGACGCGGTTCTATCTAGTTACGCGTTAAA
CCAACTAGAAATTTTTT
RUNX1 +1FLAG cr961 evopreQ1
(SEQ ID NO: 371)
GCATTTTCAGGAGGAAGCGAGTTTAAGAGCTAAGCTGGAAACAGCATAGC
AAGTTTAAATAAGGCTAGTCCGTTATCAACTCGAAAGAGTGCAACCGAGT
CGGTTGTTGTCTGAAGCCATCCCTTATCGTCGTCATCCTTGTAATCCTTC
CTCCTGAAAATAACTCTCTTTGACGCGGTTCTATCTAGTTACGCGTTAAA
CCAACTAGAAATTTTTT
RUNX1 +1FLAG flip and extension
scaffold evopreQ1
(SEQ ID NO: 372)
GCATTTTCAGGAGGAAGCGAGTTTAAGAGCTAAGCTGGAAACAGCATAGC
AAGTTTAAATAAGGCTAGTCCGTTATCAACTTGAAAAAGTGGCACCGAGT
CGGTGCTTGTCTGAAGCCATCCCTTATCGTCGTCATCCTTGTAATCCTTC
CTCCTGAAAATAACTCTCTTTGACGCGGTTCTATCTAGTTACGCGTTAAA
CCAACTAGAAATTTTTT
DNMT1 +1FLAG standard scaffold
evopreQ1
(SEQ ID NO: 373)
GATTCCTGGTGCCAGAAACAGTTTTAGAGCTAGAAATAGCAAGTTAAAAT
AAGGCTAGTCCGTTATCAACTTGAAAAAGTGGCACCGAGTCGGTGCTCTG
CCCTCCCGTCACCCCTGTCTTATCGTCGTCATCCTTGTAATCTTCTGGCA
CCAGGACCTCTTCTTTGACGCGGTTCTATCTAGTTACGCGTTAAACCAAC
TAGAAATTTTTT
DNMT1 +1FLAG cr748 evopreQ1
(SEQ ID NO: 374)
GATTCCTGGTGCCAGAAACAGTTTAAGAGCTAAGCTGGAAACAGCATAGC
AAGTTTAAATAAGGCTAGTCCGTTATCAACTCGAGAGAGTGGCACCGAGT
CGGTGCTTCTGCCCTCCCGTCACCCCTGTCTTATCGTCGTCATCCTTGTA
ATCTTCTGGCACCAGGACCTCTTCTTTGACGCGGTTCTATCTAGTTACGC
GTTAAACCAACTAGAAATTTTTT
DNMT1 +1FLAG cr289 evopreQ1
(SEQ ID NO: 375)
GATTCCTGGTGCCAGAAACAGTTTAAGAGCTAAGCTGGAAACAGCATAGC
AAGTTTAAATAAGGCTAGTCCGTTATCAACTGGAAACAGTGGCACCGAGT
CGGTGCTTCTGCCCTCCCGTCACCCCTGTCTTATCGTCGTCATCCTTGTA
ATCTTCTGGCACCAGGACCTCTTCTTTGACGCGGTTCTATCTAGTTACGC
GTTAAACCAACTAGAAATTTTTT
DNMT1 +1FLAG cr622 evopreQ1
(SEQ ID NO: 376)
GATTCCTGGTGCCAGAAACAGTTTAAGAGCTAAGCTGGAAACAGCATAGC
AAGTTTAAATAAGGCTAGTCCGTTATCAGCTGGAAACAGCGGCACCGAGT
CGGTGCTTCTGCCCTCCCGTCACCCCTGTCTTATCGTCGTCATCCTTGTA
ATCTTCTGGCACCAGGACCTCTTCTTTGACGCGGTTCTATCTAGTTACGC
GTTAAACCAACTAGAAATTTTTT
DNMT1 +1FLAG cr772 evopreQ1
(SEQ ID NO: 377)
GATTCCTGGTGCCAGAAACAGTTTAAGAGCTAAGCTGGAAACAGCATAGC
AAGTTTAAATAAGGCTAGTCCGTTATCAACTCGAAAGAGTGGCACCGAGT
CGGTGCTTCTGCCCTCCCGTCACCCCTGTCTTATCGTCGTCATCCTTGTA
ATCTTCTGGCACCAGGACCTCTTCTTTGACGCGGTTCTATCTAGTTACGC
GTTAAACCAACTAGAAATTTTTT
DNMT1 +1FLAG cr532 evopreQ1
(SEQ ID NO: 378)
GATTCCTGGTGCCAGAAACAGTTTAAGAGCTAAGCTGGAAACAGCATAGC
AAGTTTAAATAAGGCTAGTCCGTTATCAACGTGAAAACGTGACTCCGAGT
CGGAGTTTCTGCCCTCCCGTCACCCCTGTCTTATCGTCGTCATCCTTGTA
ATCTTCTGGCACCAGGACCTCTTCTTTGACGCGGTTCTATCTAGTTACGC
GTTAAACCAACTAGAAATTTTTT
DNMT1 +1FLAG cr961 evopreQ1
(SEQ ID NO: 379)
GATTCCTGGTGCCAGAAACAGTTTAAGAGCTAAGCTGGAAACAGCATAGC
AAGTTTAAATAAGGCTAGTCCGTTATCAACTCGAAAGAGTGCAACCGAGT
CGGTTGTTCTGCCCTCCCGTCACCCCTGTCTTATCGTCGTCATCCTTGTA
ATCTTCTGGCACCAGGACCTCTTCTTTGACGCGGTTCTATCTAGTTACGC
GTTAAACCAACTAGAAATTTTTT
DNMT1 +1FLAG flip and extension
scaffold evopreQ1
(SEQ ID NO: 380)
GATTCCTGGTGCCAGAAACAGTTTAAGAGCTAAGCTGGAAACAGCATAGC
AAGTTTAAATAAGGCTAGTCCGTTATCAACTTGAAAAAGTGGCACCGAGT
CGGTGCTTCTGCCCTCCCGTCACCCCTGTCTTATCGTCGTCATCCTTGTA
ATCTTCTGGCACCAGGACCTCTTCTTTGACGCGGTTCTATCTAGTTACGC
GTTAAACCAACTAGAAATTTTTT

[0777] The present disclosure contemplates any such ways to further improve the efficacy of the prime editing systems disclosed here.

[0778] In various embodiments, it may be advantageous to limit the appearance of consecutive sequence of Ts from the extension arm as consecutive series of T's may limit the capacity of the pegRNA to be transcribed. For example, strings of at least consecutive three T's, at least consecutive four T's, at least consecutive five T's, at least consecutive six T's, at least consecutive seven T's, at least consecutive eight T's, at least consecutive nine T's, at least consecutive ten T's, at least consecutive eleven T's, at least consecutive twelve T's, at least consecutive thirteen T's, at least consecutive fourteen T's, or at least consecutive fifteen T's should be avoided when designing the pegRNA, or should be at least removed from the final designed sequence. In one embodiment, one can avoid the includes of unwanted strings of consecutive T's in pegRNA extension arms but avoiding target sites that are rich in consecutive A:T nucleobase pairs.

[0779] In other embodiments, the prime editing system may include the use of pegRNA designs and strategies that can improve prime editing efficiency. These strategies seek to overcome some issues that exist because of the multi-step process required for prime editing. For example, unfavorable RNA structures that can form within the pegRNA can result in the inhibition of DNA edits being copied from the pegRNA into the genomic locus. These limitations could be overcome through the redesign and engineering of the pegRNA component. These redesigns could improve prime editor efficiency, and could allow the installation of longer inserted sequences into the genome.

[0780] Accordingly, in various embodiments, the pegRNA designs can result in longer pegRNAs by enabling efficient expression of functional pegRNAs from non-polymerase III (pol III) promoters, which would avoid the need for burdensome sequence requirements. In other embodiments, the core, Cas9-binding pegRNA scaffold can be improved to improve efficacy of the system. In yet other embodiments, modifications can be made to the pegRNA to improve reverse transcriptase (RT) processivity, which would enable the insertion of longer sequences at the targeted genomic loci. In other embodiments, RNA motifs can be added to the 5′ and/or 3′ termini of the pegRNA to improve stability, enhance RT processivity, prevent misfolding of the pegRNA, and/or recruit additional factors important for genome editing. In yet another embodiment, a platform is provided for the evolution of pegRNAs for a given sequence target that could improve the pegRNA scaffold and enhance prime editor efficiency. These designs could be used to improve any pegRNA recognized by any Cas9 or evolved variant thereof.

[0781] This application of prime editing can be further described in Example 2.

[0782] The pegRNAs may include additional design improvements that may modify the properties and/or characteristics of pegRNAs thereby improving the efficacy of prime editing. In various embodiments, these improvements may belong to one or more of a number of different categories, including but not limited to: (1) designs to enable efficient expression of functional pegRNAs from non-polymerase III (pol III) promoters, which would enable the expression of longer pegRNAs without burdensome sequence requirements; (2) improvements to the core, Cas9-binding pegRNA scaffold, which could improve efficacy; (3) modifications to the pegRNA to improve RT processivity, enabling the insertion of longer sequences at targeted genomic loci; and (4) addition of RNA motifs to the 5′ or 3′ termini of the pegRNA that improve pegRNA stability, enhance RT processivity, prevent misfolding of the pegRNA, or recruit additional factors important for genome editing.

[0783] In one embodiment, pegRNA could be designed with polIII promoters to improve the expression of longer-length pegRNA with larger extension arms. sgRNAs are typically expressed from the U6 snRNA promoter. This promoter recruits pol III to express the associated RNA and is useful for expression of short RNAs that are retained within the nucleus. However, pol III is not highly processive and is unable to express RNAs longer than a few hundred nucleotides in length at the levels required for efficient genome editing. Additionally, pol III can stall or terminate at stretches of U's, potentially limiting the sequence diversity that could be inserted using a pegRNA. Other promoters that recruit polymerase II (such as pCMV) or polymerase I (such as the U1 snRNA promoter) have been examined for their ability to express longer sgRNAs. However, these promoters are typically partially transcribed, which would result in extra sequence 5′ of the spacer in the expressed pegRNA, which has been shown to result in markedly reduced Cas9:sgRNA activity in a site-dependent manner. Additionally, while pol III-transcribed pegRNAs can simply terminate in a run of 6-7 U's, pegRNAs transcribed from pol II or pol I would require a different termination signal. Often such signals also result in polyadenylation, which would result in undesired transport of the pegRNA from the nucleus. Similarly, RNAs expressed from pol II promoters such as pCMV are typically 5′-capped, also resulting in their nuclear export.

[0784] Previously, Rinn and coworkers screened a variety of expression platforms for the production of long-noncoding RNA- (lncRNA) tagged sgRNAs¹⁸³. These platforms include RNAs expressed from pCMV and that terminate in the ENE element from the MALAT1 ncRNA from humans¹⁸⁴, the PAN ENE element from KSHViss, or the 3′ box from U1 snRNA¹⁸⁶. Notably, the MALAT1 ncRNA and PAN ENEs form triple helices protecting the polyA-tail^{184, 187}. These constructs could also enhance RNA stability. It is contemplated that these expression systems will also enable the expression of longer pegRNAs.

[0785] In addition, a series of methods have been designed for the cleavage of the portion of the pol II promoter that would be transcribed as part of the pegRNA, adding either a self-cleaving ribozyme such as the hammerhead¹⁸⁸, pistol¹⁸⁹, hatchet¹⁸⁹, hairpin¹⁹⁰, VS¹⁹¹, twister¹⁹², or twister sister¹⁹² ribozymes, or other self-cleaving elements to process the transcribed guide, or a hairpin that is recognized by Csy4¹⁹³ and also leads to processing of the guide. Also, incorporation of multiple ENE motifs can lead to improved pegRNA expression and stability. Circularizing the pegRNA in the form of a circular intronic RNA (ciRNA) can lead to enhanced RNA expression and stability, as well as nuclear localization.

[0786] In various embodiments, the pegRNA may include various above elements, as exemplified by SEQ ID NOs: 241-245.

[0787] In various other embodiments, the pegRNA may be improved by introducing improvements to the scaffold or core sequences. This can be done by introducing known

[0788] The core, Cas9-binding pegRNA scaffold can be improved to enhance PE activity. In an exemplary approach, the first pairing element of the scaffold (P1) contains a GTTTT-AAAAC (SEQ ID NO: 246) pairing element. Such runs of Ts can result in pol III pausing and premature termination of the RNA transcript. Rational mutation of one of the T-A pairs to a G-C pair in this portion of P1 can enhance sgRNA activity. This approach can be used to improve pegRNA. Additionally, increasing the length of P1 can enhance sgRNA folding and can improve pegRNA activity. Example improvements to the core can include:

pegRNA containing a 6 nt extension to P1
(SEQ ID NO: 228)
GGCCCAGACTGAGCACGTGAGTTTTAGAGCTAGCTCATGAAAATGAGCTA
GCAAGTTAAAATAAGGCTAGTCCGTTATCAACTTGAAAAAGTGGGACCGA
GTCGGTCCTCTGCCATCAAAGCGTGCTCAGTCTGTTTTTTT
pegRNA containing a T-A to G-C mutation within P1
(SEQ ID NOS: 247 AND 248
GGCCCAGACTGAGCACGTGAGTTTGAGAGCTAGAAATAGCAAGTTTAAAT
AAGGCTAGTCCGTTATCAACTTGAAAAAGTGGGACCGAGTCGGTCCTCTG
CCATCAAAGCGTGCTCAGTCTGTTTTTTT.

[0789] In various other embodiments, the pegRNA may be improved by introducing modifications to the edit template region. As the size of the insertion templated by the pegRNA increases, it is more likely to be degraded by endonucleases, undergo spontaneous hydrolysis, or fold into secondary structures unable to be reverse-transcribed by the RT or that disrupt folding of the pegRNA scaffold and subsequent Cas9-RT binding. Accordingly, it is likely that modification to the template of the pegRNA might be necessary to affect large insertions, such as the insertion of whole genes. Some strategies to do so include the incorporation of modified nucleotides within a synthetic or semi-synthetic pegRNA that render the RNA more resistant to degradation or hydrolysis or less likely to adopt inhibitory secondary structures¹⁹⁶. Such modifications could include 8-aza-7-deazaguanosine, which would reduce RNA secondary structure in G-rich sequences; locked-nucleic acids (LNA) that reduce degradation and enhance certain kinds of RNA secondary structure; 2′-O-methyl, 2′-fluoro, or 2′-O-methoxyethoxy modifications that enhance RNA stability. Such modifications could also be included elsewhere in the pegRNA to enhance stability and activity. Alternatively or additionally, the template of the pegRNA could be designed such that it both encodes for a desired protein product and is also more likely to adopt simple secondary structures that are able to be unfolded by the RT. Such simple structures would act as a thermodynamic sink, making it less likely that more complicated structures that would prevent reverse transcription would occur. Finally, one could also split the template into two, separate pegRNAs. In such a design, a PE would be used to initiate transcription and also recruit a separate template RNA to the targeted site via an RNA-binding protein fused to Cas9 or an RNA recognition element on the pegRNA itself such as the MS2 aptamer. The RT could either directly bind to this separate template RNA, or initiate reverse transcription on the original pegRNA before swapping to the second template. Such an approach could enable long insertions by both preventing misfolding of the pegRNA upon addition of the long template and also by not requiring dissociation of Cas9 from the genome for long insertions to occur, which could possibly be inhibiting PE-based long insertions.

[0790] In still other embodiments, the pegRNA may be improved by introducing additional RNA motifs at the 5′ and 3′ termini of the pegRNAs. Several such motifs—such as the PAN ENE from KSHV and the ENE from MALAT1 were discussed above as possible means to terminate expression of longer pegRNAs from non-pol III promoters. These elements form RNA triple helices that engulf the polyA tail, resulting in their being retained within the nucleus^{184,187}. However, by forming complex structures at the 3′ terminus of the pegRNA that occlude the terminal nucleotide, these structures would also likely help prevent exonuclease-mediated degradation of pegRNAs.

[0791] Other structural elements inserted at the 3′ terminus could also enhance RNA stability, albeit without enabling termination from non-pol III promoters. Such motifs could include hairpins or RNA quadruplexes that would occlude the 3′ terminus¹⁹⁷, or self-cleaving ribozymes such as HDV that would result in the formation of a 2′-3′-cyclic phosphate at the 3′ terminus and also potentially render the pegRNA less likely to be degraded by exonucleases¹⁹⁸. Inducing the pegRNA to cyclize via incomplete splicing—to form a ciRNA—could also increase pegRNA stability and result in the pegRNA being retained within the nucleus¹⁹⁴.

[0792] Additional RNA motifs could also improve RT processivity or enhance pegRNA activity by enhancing RT binding to the DNA-RNA duplex. Addition of the native sequence bound by the RT in its cognate retroviral genome could enhance RT activity¹⁹⁹. This could include the native primer binding site (PBS), polypurine tract (PPT), or kissing loops involved in retroviral genome dimerization and initiation of transcription¹⁹⁹.

[0793] Addition of dimerization motifs—such as kissing loops or a GNRA tetraloop/tetraloop receptor pair²⁰⁰—at the 5′ and 3′ termini of the pegRNA could also result in effective circularization of the pegRNA, improving stability. Additionally, it is envisioned that addition of these motifs could enable the physical separation of the pegRNA spacer and primer, preventing occlusion of the spacer which could hinder PE activity. Short 5′ or 3′ extensions to the pegRNA that form a small toehold hairpin in the spacer region could also compete favorably against the annealing region of the pegRNA binding the spacer. Finally, kissing loops could also be used to recruit other template RNAs to the genomic site and enable swapping of RT activity from one RNA to the other. Example improvements include, but are not limited to SEQ ID NOs: 251-255.

[0794] pegRNA scaffold could be further improved via directed evolution, in an analogous fashion to how SpCas9 and prime editor (PE) have been improved. Directed evolution could enhance pegRNA recognition by Cas9 or evolved Cas9 variants. Additionally, it is likely that different pegRNA scaffold sequences would be optimal at different genomic loci, either enhancing PE activity at the site in question, reducing off-target activities, or both. Finally, evolution of pegRNA scaffolds to which other RNA motifs have been added would almost certainly improve the activity of the fused pegRNA relative to the unevolved, fusion RNA. For instance, evolution of allosteric ribozymes composed of c-di-GMP-I aptamers and hammerhead ribozymes led to dramatically improved activity²⁰², suggesting that evolution would improve the activity of hammerhead-pegRNA fusions as well. In addition, while Cas9 currently does not generally tolerate 5′ extension of the sgRNA, directed evolution will likely generate enabling mutations that mitigate this intolerance, allowing additional RNA motifs to be utilized.

[0795] The present disclosure contemplates any such ways to further improve the efficacy of the prime editing systems disclosed here.

### [7] Computational Method for Nucleotide Linker Design

[0796] In one aspect of the disclosure, the inventors have developed a novel computational technique, which may be embodied in software, for identifying one or more nucleotide linkers for coupling a prime editing guide RNA to a nucleic acid moiety, such as, but not limited to, an aptamer (e.g., prequeosin₁-1 riboswitch aptamer or “evopreQ₁-1”) or a variant thereof, a pseudoknot (the MMLV viral genome pseudoknot or “Mpknot-1”) or a variant thereof, a tRNA (e.g., the modified tRNA used by MMLV as a primer for reverse transcription) or a variant thereof, or a G-quadruplex or a variant thereof. Exemplary nucleotide sequences of such linkers are provided throughout herein, and include, but are not limited to SEQ ID NOs: 225-236.

[0797] The computational technique, which may be referred to herein as the pegRNA Linker Identification Tool (“pegLIT”), involves efficiently evaluating nucleic acid linker candidates to identify those which have lower propensity for base pairing to other regions of the pegRNA (e.g., regions comprising the primer binding site, spacer, DNA synthesis template, and/or gRNA core). In some embodiments, the propensity of a particular linker candidate to base pair with one or more regions of the pegRNA may be determined using computational tools for modeling RNA-to-RNA interactions while taking into account RNA's secondary structure. One illustrative example of such a computational tool is ViennaRNA, aspects of which are described in Lorenz, R. et al. ViennaRNA package 2.0. Algorithms Mol Biol 6, 26 (2011), which is incorporated by reference herein in its entirety.

[0798] The inventors have recognized that evaluating the fitness of each possible nucleic acid linker candidate is computationally impractical because: (1) the evaluation of fitness of a single linker candidate is computationally expensive (e.g., because it involves physics-based modeling of RNA secondary structures); and (2) the number of linker candidates to be considered increases exponentially with their length. Moreover, in the context of screening, all linker candidates would have to be re-evaluated for any change in the pegRNA (e.g., in the PBS, spacer, template, and/or core regions).

[0799] Accordingly, the inventors have developed an optimization technique to efficiently explore the space of nucleic acid linker candidates to identify linkers suitable for coupling a pegRNA to a nucleic acid moiety. In some embodiments, the optimization technique involves using an iterative optimization approach (e.g., simulated annealing) to identify a number of linker candidates. In some embodiments, the linker candidates identified using the optimization technique may be clustered to obtain linker clusters and one or more representative linkers in each cluster may be returned, which may help to promote diversity among the identified linkers.

[0800] In some embodiments, the optimization technique involves calculated multiple scores for each linker candidate being considered. Each of the multiple scores may be indicative of a degree to which the linker candidate may interact with a region of the pegRNA. In this way, the multiple scores for a single linker candidate represent the degree to which the linker candidate interacts with multiple regions of the pegRNA. Considering linker-to-pegRNA interactions on a region-by-region basis helps to determine the fitness of each linker candidate more accurately than is possible by other methods.

[0801] Indeed, the computational technique developed by the inventors not only results in computational improvements (e.g., a reduction in the utilization of processor and memory computer resources) relative to a brute-force search approach, but also identifies linkers that improve overall PE editing efficiency as compared with human-designed linkers or linkers that were predicted by the computational tool to interact with the primer binding site. The improvements in editing efficiency are shown in and described with reference to FIGS. 113A-113E.

[0802] Accordingly, some embodiments provide for a method for identifying at least one nucleic acid linker for coupling a prime editing guide RNA (pegRNA) to a nucleic acid moiety, the method comprising: (1) generating a plurality of nucleic acid linker candidates including a first nucleic acid linker candidate; (2) identifying the at least one nucleic acid linker from among the plurality of nucleic acid linker candidates at least in part by: (a) calculating multiple scores for each of at least some of the plurality of nucleic acid linker candidates, the calculating comprising calculating a first set of scores for the first nucleic acid linker candidate, the first set of scores comprising: a first score indicative of a degree of interaction between the first nucleic acid linker candidate and a first region of the pegRNA; a second score indicative of a degree of interaction between the first nucleic acid linker candidate and a second region of the pegRNA (e.g., with the first and second regions being different regions); and (b) identifying the at least one nucleic acid linker from among the at least some of the plurality of nucleic acid linker candidates using the calculated multiple scores; and (3) outputting information indicative of the at least one nucleic acid linker.

[0803] In some embodiments, the first score is indicative of a degree to which the first nucleic acid linker candidate is predicted to avoid interaction with the first region of the pegRNA, and the second score is indicative of a degree to which the first nucleic acid linker candidate is predicted to avoid interaction with the second region of the pegRNA. For example, if the first score has the value of 0.8, that may indicate that, on average, the predicted probability of a pegRNA folded state lacking base pairing between any nucleotide of the linker candidate and the first region is 80%. As another example, if the second score has the value of 0.9, that may indicate that, on average, the predicted probability of a pegRNA folded state lacking base pairing between any nucleotide of the linker candidate and the second region is 90%.

[0804] In some embodiments, the first region may comprise a primer binding site of the pegRNA, a spacer of the pegRNA, a DNA synthesis template of the pegRNA, or a gRNA core of the pegRNA. The second region also may comprise a primer binding site of the pegRNA, a spacer of the pegRNA, a DNA synthesis template of the pegRNA, or a gRNA core of the pegRNA.

[0805] In some embodiments, the first set of scores further comprises a third score indicative of a degree to which the first nucleic acid linker candidate is predicted to avoid interaction with a third region of the pegRNA and a fourth score indicative of a degree to which the first nucleic acid linker candidate is predicted to avoid interaction with a fourth region of the pegRNA. In some embodiments, the first, second, third, and fourth regions may comprise, respectively, a PBS of the pegRNA, a spacer of the pegRNA, a DNA synthesis template of the pegRNA, and a gRNA core of the pegRNA.

[0806] In some embodiments, the pegRNA is for installing a nucleotide edit in a double stranded target DNA sequence. The pegRNA may comprise: a spacer that hybridizes to a first strand of the double stranded target DNA sequence, an extension arm that hybridizes to a second strand of the double stranded target DNA sequence, the extension arm comprising a primer binding site (PBS) and a DNA synthesis template comprising the nucleotide edit, and a gRNA core that interacts with a nucleic acid programmable DNA binding protein napDNAbp. In some such embodiments, the first region comprises the PBS, the second region comprises the spacer, the third region comprises the DNA synthesis template, and the fourth region comprises the gRNA core.

[0807] In some embodiments, fitness of various linker candidates may be evaluated relative to one another based on their scores. In some embodiments, the plurality of nucleic acid linker candidates comprises a second nucleic acid linker candidate, and identifying the at least one nucleic acid linker from among the at least some of the plurality of nucleic acid linker candidates using the calculated multiple scores comprises comparing the first set of scores for the first nucleic acid linker candidate with a second set of scores for the second nucleic acid linker candidate.

[0808] There are multiple ways in which the score sets of two different linker candidates may be compared. For example, in some embodiments, each score set may have constituent scores for certain regions (e.g., the region comprising PBS, the region comprising spacer) and the candidates may be compared first based on their respective scores for a particular region (e.g., the region comprising the PBS). If the scores for the particular region are equal or are within a threshold (e.g., such that they may be considered to be close to one another), then scores for another region may be compared (e.g., the region comprising the spacer). If the scores for the other region are equal or are within a threshold, the scores for a third region (e.g., the region comprising the DNA synthesis template) may be compared. If the scores for the third region are equal or are within a threshold, the scores for a fourth region (e.g., the region comprising the gRNA core) may be compared. And so on.

[0809] Accordingly, in some embodiments, the first region comprises a primer binding site (PBS), the first score in the first set of scores is indicative of a degree to which the first nucleic acid linker candidate is predicted to avoid interaction with the first region of the pegRNA, a third score in the second set of scores is indicative of a degree to which the second nucleic acid linker candidate is predicted to avoid interaction with the first region of the pegRNA, and comparing the first set of scores with the second set of scores comprises comparing the first score with the third score. In some embodiments, when the first score is equal to or is within a threshold distance of the third score, comparing the first set of scores with the second set of scores further comprises comparing a score, other than the first score, in the first set of scores with another score, other than the third score, in the second set of scores.

[0810] In some embodiments, the technique for identifying candidate linkers may be performed iteratively. In some embodiments, generating the plurality of nucleic acid linker candidates and determining the at least one nucleic acid linker from among the plurality of nucleic acid linker candidates may be performed in accordance with an iterative optimization algorithm (e.g., one that involves simulating annealing).

[0811] In some embodiments, the plurality of nucleic acid linker candidates includes a second nucleic acid linker candidate, and performing the generating and the determining in accordance with the iterative optimization algorithm comprises: generating the first nucleic acid linker candidate; determining the first scores for the first nucleic acid linker candidate, wherein the identifying comprises determining whether to include the first nucleic acid linker candidate in the at least one nucleic acid linker based on the first scores; after determining the first scores for the first nucleic acid linker candidate, generating the second acid linker candidate; and determining second scores for the second nucleic acid linker candidate, wherein the identifying comprises determining whether to include the second nucleic acid linker candidate in the at least one nucleic acid linker based on the second scores. Aspects of such an iterative embodiment are described herein including with reference to FIG. 119.

[0812] In some embodiments, computing scores in the first set of scores is performed using software for modeling RNA-to-RNA interactions (e.g., ViennaRNA).

[0813] In some embodiments, the techniques further include filtering the plurality of nucleic acid linker candidates using one or more filtering rules. For example, linker candidates having at least a threshold number of the same nucleotide appearing consecutively (e.g., four uridines in a row) may be removed from further consideration in accordance with a filtering rule. As another example, linker candidates with AC content below a threshold percentage (e.g., below 50%) may be removed from further consideration in accordance with a filtering rule. One or more other filtering rules may be used in addition to or instead of the above two example filtering rules, as aspects of the technology described herein are not limited in this respect.

[0814] In some embodiments, the techniques further include clustering identified linker candidates and determining linkers representative of different clusters in order to obtain a diverse population of linker candidates. Accordingly, in some embodiments, identifying the at least one nucleic acid linker comprises: identifying a subset of the plurality of nucleic acid linker candidates based on their respective scores; clustering (e.g., using hierarchical agglomerative clustering or any other suitable clustering technique) the subset of nucleic acid linker candidates to obtain a plurality of clusters; and including at least one representative member of each of the plurality of clusters in the at least one nucleic acid linker.

[0815] In some embodiments, one or more of the at least one nucleic acid linker identified may be manufactured and used in various applications described herein.

[0816] FIG. 118 is a flowchart of an illustrative process 11800 for identifying one or more nucleic acid linkers for coupling a prime editing guide RNA to a nucleic acid moiety, in accordance with some embodiments of the technology described herein. The process 11800 may be implemented using any suitable computing device(s), as aspects of the technology described herein are not limited in this respect.

[0817] Process 11800 begins at act 11802 where one or more nucleic acid linker candidates may be generated. Any suitable number of linker candidates may be generated at act 11802 in any suitable way. In some embodiments, multiple linker candidates may be generated at act 11802 and some or all of these candidates may be further evaluated at act 11810 and its subacts. In other embodiments, one or a small number of linker candidates may be generated at act 11802 and, when it is determined that additional linker candidates are needed (e.g., at act 11818), then process 11800 may return to act 11802 so that additional linker candidates are generated.

[0818] Each of the linkers generated may have any suitable length. For example, a linker candidate may consist of 4 nucleotides, 8 nucleotides, 15 nucleotides, or any suitable number of nucleotides in the ranges of 4-32 nucleotides, 8-16 nucleotides, or any other suitable range within these ranges.

[0819] In some embodiments, a linker candidate may be generated by selecting each of one or more (or all) of the nucleotides at random. Each nucleotide may be selected uniformly at random or in accordance with a specified distribution (e.g., uniform or any other discrete distribution). In some embodiments, each of the nucleotides may be selected independently of the other linker nucleotides. In some embodiments, two or more of the nucleotides may be selected in a correlated way, for example, by sampling from joint distribution defined on a sequence of two or more nucleotides (whether or not consecutive).

[0820] Next, process 11800 proceeds to act 11810, where at least one nucleic acid linker is identified from among the nucleic acid linker candidates generated during act 11802. The identification involves: (1) at act 11812, calculating multiple scores for each of at least some of the linker candidates generated during act 11802; and (2) at act 11818, identifying the at least one nucleic acid linker candidate using the multiple scares calculated at act 11812. Each of these acts is described in turn. In some embodiments, the linker candidates may be filtered using one or more filtering rules (examples of which are described herein) so that there is no need to expend computing resources to calculate scores for linker candidates that are otherwise unsuitable.

[0821] As described herein, calculating multiple scores for a particular linker candidate involves determining multiple scores for a respective plurality of multiple regions of pegRNA. In some embodiments, each of the multiple scores may be indicative of a degree of interaction between the linker candidate and a respective one of the multiple regions. For example, a particular score may be indicative of a degree to which the linker is predicted to interact with or to avoid interaction with a particular region. In the illustrative example, act 11812 involves calculating at least two scores for each of at least some of linker candidates. In particular, at act 11814, a first score indicative of a degree of interaction between a first linker candidate and a first region of the pegRNA (e.g., a region comprising the PBS or any other suitable region examples of which are provided herein) may be calculated and, at act 11816, a second score indicative of a degree of interaction between the first linker candidate the a second region of the pegRNA (e.g., a region comprising the spacer or any other suitable region examples of which are provided herein) may be calculated. Each of the scores may be calculated using RNA-to-RNA interaction modeling software (e.g., ViennaRNA) or any other suitable software, as aspects of the technology described herein are not limited in this respect.

[0822] Although in the illustrative example act 11812 involves calculating two scores, in some embodiments 3, 4, 5, 6, or any other suitable number of scores may be calculated for each linker candidate to obtain a measure of a degree of interaction with 3, 4, 5, 6, or any other suitable number of pegRNA regions, as aspects of the technology described herein are not limited in this respect. For example, in one illustrative embodiment, four scores may be calculated for a linker candidate and may be indicative of a degree of interaction between the linker candidate and the PBS, spacer, DNA synthesis template, and gRNA core regions of the pegRNA.

[0823] At act 11818, the calculated scores may be used to identify the “best” nucleic acid linker candidates. For example, the scores may be used to identify a subset of the linker candidates that are predicted to have the least interaction with one or more regions of the pegRNA. Interaction with some regions of the pegRNA may be considered to be worse than interaction with other regions of the pegRNA. Accordingly, in some embodiments, the scores may be examined on a per region basis to identify linker candidates for subsequent use. For example, in some embodiments, the linker candidates may be compared based on their PBS scores—scores indicating a degree to which the linkers are predicted to avoid interacting with a region of the pegRNA comprising the PBS. A threshold number of candidate linkers interacting least with such a region may be retained (e.g., 100 linker candidates that are predicted to interact least with the PBS may be retained). Should multiple linker candidates have the same score for the same region, these candidates may be compared/ranked with using their scores for other regions, as described herein.

[0824] In some embodiments, the acts 11812 and 11818 may be performed in accordance with an iterative optimization algorithm (as indicated by the arrow from 11818 to 11812 in FIG. 118). For example, the acts 11812 and 11818 may be performed in accordance with a simulated annealing technique. Aspects of this are described herein including with reference to FIG. 119.

[0825] After a subset of the nucleic acid candidates are identified based on their corresponding scores (and there may be any suitable number of such candidates identified; for example, this may be controlled by a parameter setting indicating the desired number of candidates), in some embodiments, the identified nucleic acid linker candidates may be further sieved to identify a subset of linker candidates which are diverse in their sequence makeup. To this end, in some embodiments, the identified nucleic acid linker candidates may be clustered to obtain multiple clusters and one or more representative linkers in each cluster may be output at act 11818, which promotes sequence diversity among the output linker candidates. Any suitable clustering technique (e.g., agglomerative hierarchical clustering) may be used for this, as aspects of the technology described herein are not limited in this respect.

[0826] Information about the linker candidates identified during act 11810 may be output at act 11820. The information may include the sequences of the linker candidates, their scores, and/or any other related information. The information may be transmitted to one or more other computing devices over a communication network, stored in at least one non-transitory computer readable storage medium (e.g., in memory, on a hard drive, in a file, etc.) for subsequent access, presented in a graphical user interface, and/or output in any other suitable way.

[0827] As described above, aspects of the process 18000 may be performed iteratively. One illustrative example of this is shown in FIG. 119. FIG. 119 is a flowchart of an illustrative process 11900 for iteratively identifying one or more nucleic acid linkers for coupling a prime editing guide RNA to a nucleic acid moiety, in accordance with some embodiments of the technology described herein. The process 11900 may be implemented using any suitable computing device(s), as aspects of the technology described herein are not limited in this respect.

[0828] Process 11900 begins at act 11902, where a nucleic acid linker candidate is generated. The linker candidate may have any suitable length, and examples of lengths are provided herein. The linker candidate may be generated in any suitable way including in any of the ways described with reference to act 11802.

[0829] Next, process 11900 proceeds to decision block 11904, where it is determined whether the linker candidate generated at act 11902 passes one or more filtering rules. Any suitable filtering rules may be used to eliminate unwanted linker candidates. For example, a candidate linker having at least a threshold number of the same nucleotide appearing consecutively (e.g., four uridines in a row) may be removed from further consideration (by not passing this filtering rule). As another example, a candidate linker having AC content below a threshold percentage (e.g., below 50%) may be removed from further consideration (by not passing this filtering rule).

[0830] When it is determined, at decision block 11904, that the linker candidate does not pass one or more filter rules, the process 11900 returns to act 11902, where another linker candidate is generated. On the other hand, when it is determined, at decision block 11904, that the linker candidate passes the filter rule(s), process 11900 proceeds to act 11906, where multiple scores for the linker candidate are calculated. As described herein, the multiple scores indicate, for respective multiple pegRNA regions, a degree of interaction between the candidate linker and the regions. Aspects of how to calculate the multiple scores for a linker candidate are described herein.

[0831] Next, process 11900 proceeds to act 11908, where the scores for the linker candidate that were determined at act 11906 are compared with scores for linker candidates that were previously retained. For example, a set of linker candidates (e.g., 100 candidates) may have already been identified from among the candidate linkers examined so far and the scores for the new linker candidate (the candidate generated at act 11902) may be compared to the previously determined scores for the retained candidates. Aspects of how to compare the scores of a linker candidate with respective scores of other linker candidates are described herein.

[0832] On the basis of this comparison, at decision block 11910, it is determine whether the new linker candidate is to be retained. When the comparison of act 11908 indicates that the new linker candidate is better than at least one of the retained candidates, then the new linker candidate may be retained, at act 11912. Optionally, one of the previously retained linker candidates may be dropped from the list (e.g., if there is a fixed number of linker candidates that may be retained and adding a new linker to the list causes the total number of retained linker candidates to exceed the fixed number).

[0833] On the other hand, when the comparison of act 11908 indicates that the new linker candidate is not better than any of the retained candidates, then the new linker candidate is retained only with a certain probability at act 11912; otherwise it is dropped and process 11900 returns to act 11902 where a new linker candidate may be generated. That probability may be selected in accordance with a simulated annealing schedule, in some embodiments. In that sense, the iterative optimization scheme of process 11900 may be considered to involve simulated annealing.

[0834] After the linker candidate is retained at act 11912, process 11900 proceeds to decision block 11914 where it is determined whether additional linker candidates should be generated. This determination may be made in any suitable way, for example, based on the number of iterations/time taken, on how many candidate linkers have been retained, on an estimate of quality and/or diversity among the retained candidates, and/or any suitable metric. When it is determined that additional linker candidates are to be generated, the process 11900 returns to act 11902 where a new linker candidate may be generated. Otherwise, the process 11900 proceeds to act 11916 where information indicative of at least some (e.g., all, at least one representative member of clusters of all) of the retained linker candidates is output. Examples of outputting information about retained candidate linkers is described herein.

[0835] FIG. 120 shows an illustrative implementation of a computer system 12000 in which embodiments of the technology described herein may be implemented. For example, any of the computing devices described herein may be implemented as computing system 12000. The computing system 12000 may include one or more computer hardware processors 12002 and one or more articles of manufacture that comprise non-transitory computer-readable storage media (e.g., memory 12004 and one or more non-volatile storage devices 12006). The processor 12002(s) may control writing data to and reading data from the memory 12004 and the non-volatile storage device(s) 12006 in any suitable manner. To perform any of the functionality described herein, the processor(s) 12002 may execute one or more processor-executable instructions stored in one or more non-transitory computer-readable storage media (e.g., the memory 12004), which may serve as non-transitory computer-readable storage media storing processor-executable instructions for execution by the processor(s) 12002.

[0836] The terms “program” or “software” are used herein in a generic sense to refer to any type of computer code or set of processor-executable instructions that may be employed to program a computer or other processor to implement various aspects of embodiments as described above. Additionally, according to one aspect, one or more computer programs that when executed perform methods of the disclosure provided herein need not reside on a single computer or processor but may be distributed in a modular fashion among different computers or processors to implement various aspects of the disclosure provided herein.

[0837] Processor-executable instructions may be in many forms, such as program modules, executed by one or more computers or other devices. Generally, program modules include routines, programs, objects, components, data structures, etc. that perform particular tasks or implement particular abstract data types. Typically, the functionality of the program modules may be combined or distributed.

[0838] Also, data structures may be stored in one or more non-transitory computer-readable storage media in any suitable form. For simplicity of illustration, data structures may be shown to have fields that are related through location in the data structure. Such relationships may likewise be achieved by assigning storage for the fields with locations in a non-transitory computer-readable medium that convey relationship between the fields. However, any suitable mechanism may be used to establish relationships among information in fields of a data structure, including through the use of pointers, tags or other mechanisms that establish relationships among data elements.

[0839] As used herein in the specification and in the claims, the phrase “at least one,” in reference to a list of one or more elements, should be understood to mean at least one element selected from any one or more of the elements in the list of elements, but not necessarily including at least one of each and every element specifically listed within the list of elements and not excluding any combinations of elements in the list of elements. This definition also allows that elements may optionally be present other than the elements specifically identified within the list of elements to which the phrase “at least one” refers, whether related or unrelated to those elements specifically identified. Thus, for example, “at least one of A and B” (or, equivalently, “at least one of A or B,” or, equivalently “at least one of A and/or B”) can refer, in one embodiment, to at least one, optionally including more than one, A, with no B present (and optionally including elements other than B); in another embodiment, to at least one, optionally including more than one, B, with no A present (and optionally including elements other than A); in yet another embodiment, to at least one, optionally including more than one, A, and at least one, optionally including more than one, B (and optionally including other elements);etc.

[0840] The phrase “and/or,” as used herein in the specification and in the claims, should be understood to mean “either or both” of the elements so conjoined, i.e., elements that are conjunctively present in some cases and disjunctively present in other cases. Multiple elements listed with “and/or” should be construed in the same fashion, i.e., “one or more” of the elements so conjoined. Other elements may optionally be present other than the elements specifically identified by the “and/or” clause, whether related or unrelated to those elements specifically identified. Thus, as a non-limiting example, a reference to “A and/or B”, when used in conjunction with open-ended language such as “comprising” can refer, in one embodiment, to A only (optionally including elements other than B); in another embodiment, to B only (optionally including elements other than A); in yet another embodiment, to both A and B (optionally including other elements); etc.

[0841] Use of ordinal terms such as “first,” “second,” “third,” etc., in the claims to modify a claim element does not by itself connote any priority, precedence, or order of one claim element over another or the temporal order in which acts of a method are performed. Such terms are used merely as labels to distinguish one claim element having a certain name from another element having a same name (but for use of the ordinal term). The phraseology and terminology used herein is for the purpose of description and should not be regarded as limiting. The use of “including,” “comprising,” “having,” “containing,” “involving,” and variations thereof, is meant to encompass the items listed thereafter and additional items.

[0842] Having described several embodiments of the techniques described herein in detail, various modifications, and improvements will readily occur to those skilled in the art. Such modifications and improvements are intended to be within the spirit and scope of the disclosure. Accordingly, the foregoing description is by way of example only, and is not intended as limiting. The techniques are limited only as defined by the following claims and the equivalents thereto.[9] Split pegRNA designs for trans prime editing

[0843] The instant disclosure also contemplates trans prime editing, which refers to a modified version of prime editing which operates by separating the pegRNA into two distinct molecules: a guide RNA and a tPERT molecule. The tPERT molecule is programmed to co-localize with the prime editor complex at a target DNA site, bringing the primer binding site and the DNA synthesis template to the prime editor in trans. For example, see FIG. 3G for an embodiment of a trans prime editor (tPE) which shows a two-component system comprising (1) an recruiting protein (RP)-PE:gRNA complex and (2) a tPERT that includes a primer binding site and a DNA synthesis template joined to an RNA-protein recruitment domain (e.g., stem loop or hairpin), wherein the recruiting protein component of the RP-PE:gRNA complex recruits the tPERT to a target site to be edited, thereby associating the PBS and DNA synthesis template with the prime editor in trans. Said another way, the tPERT is engineered to contain (all or part of) the extension arm of a pegRNA, which includes the primer binding site and the DNA synthesis template. One advantage of this approach is to separate the extension arm of a pegRNA from the guide RNA, thereby minimizing annealing interactions that tend to occur between the PBS of the extension arm and the spacer sequence of the guide RNA.

[0844] Trans prime editing may be conducts with any pegRNA described herein, including the modified pegRNAs described herein which result in improved PE editing efficiency.

[0845] A key feature of trans prime editing is the ability of the trans prime editor to recruit the tPERT to the site of DNA editing, thereby effectively co-localizing all of the functions of a pegRNA at the site of prime editing. Recruitment can be achieve by installing an RNA-protein recruitment domain, such as a MS2 aptamer, into the tPERT and fusing a corresponding recruiting protein to the prime editor (e.g., via a linker to the napDNAbp or via a linker to the polymerase) that is capable of specifically binding to the RNA-protein recruitment domain, thereby recruiting the tPERT molecule to the prime editor complex. As depicted in the process described in FIG. 3H, the RP-PE:gRNA complex binds to and nicks the target DNA sequence. Then, the recruiting protein (RP) recruits a tPERT to co-localize to the prime editor complex bound to the DNA target site, thereby allowing the primer binding site, located on the tPERT, to bind to the primer sequence on the nicked strand, and subsequently, allowing the polymerase (e.g., RT) to synthesize a single strand of DNA against the DNA synthesis template, located on the tPERT, up through the 5′ end of the tPERT.

[0846] While the tPERT is shown in FIG. 3G and FIG. 3H as comprising the PBS and DNA synthesis template on the 5′ end of the RNA-protein recruitment domain, the tPERT in other configurations may be designed with the PBS and DNA synthesis template located on the 3′ end of the RNA-protein recruitment domain. However, the tPERT with the 5′ extension has the advantage that synthesis of the single strand of DNA will naturally terminate at the 5′ end of the tPERT and thus, does not risk using any portion of the RNA-protein recruitment domain as a template during the DNA synthesis stage of prime editing.

### [8] Delivery of Prime Editors

[0847] In another aspect, the present disclosure provides for the delivery of prime editors in vitro and in vivo using various strategies, including on separate vectors using split inteins and as well as direct delivery strategies of the ribonucleoprotein complex (i.e., the prime editor complexed to the pegRNA and/or the second-site gRNA) using techniques such as electroporation, use of cationic lipid-mediated formulations, and induced endocytosis methods using receptor ligands fused to the ribonucleoprotein complexes. Any such methods are contemplated herein.

### Overview of Delivery Options

[0848] In some aspects, the invention provides methods comprising delivering one or more prime editor-encoding polynucleotides, such as or one or more vectors as described herein encoding one or more components of the prime editing system described herein, one or more transcripts thereof, and/or one or proteins transcribed therefrom, to a host cell. In some aspects, the invention further provides cells produced by such methods, and organisms (such as animals, plants, or fungi) comprising or produced from such cells. In some embodiments, a prime editor as described herein in combination with (and optionally complexed with) a guide sequence is delivered to a cell. Conventional viral and non-viral based gene transfer methods can be used to introduce nucleic acids in mammalian cells or target tissues. Such methods can be used to administer nucleic acids encoding components of a prime editor to cells in culture, or in a host organism. Non-viral vector delivery systems include DNA plasmids, RNA (e.g. a transcript of a vector described herein), naked nucleic acid, and nucleic acid complexed with a delivery vehicle, such as a liposome. Viral vector delivery systems include DNA and RNA viruses, which have either episomal or integrated genomes after delivery to the cell. For a review of gene therapy procedures, see Anderson, Science 256:808-813 (1992); Nabel & Felgner, TIBTECH 11:211-217 (1993); Mitani & Caskey, TIBTECH 11:162-166 (1993); Dillon, TIBTECH 11:167-175 (1993); Miller, Nature 357:455-460 (1992); Van Brunt, Biotechnology 6(10):1149-1154 (1988); Vigne, Restorative Neurology and Neuroscience 8:35-36 (1995); Kremer & Perricaudet, British Medical Bulletin 51(1):31-44 (1995); Haddada et al., in Current Topics in Microbiology and Immunology Doerfler and Bihm (eds) (1995); and Yu et al., Gene Therapy 1:13-26 (1994).

[0849] Methods of non-viral delivery of nucleic acids include lipofection, nucleofection, microinjection, biolistics, virosomes, liposomes, immunoliposomes, polycation or lipid:nucleic acid conjugates, naked DNA, artificial virions, and agent-enhanced uptake of DNA. Lipofection is described in e.g., U.S. Pat. Nos. 5,049,386, 4,946,787; and 4,897,355) and lipofection reagents are sold commercially (e.g., Transfectam™ and Lipofectin™) Cationic and neutral lipids that are suitable for efficient receptor-recognition lipofection of polynucleotides include those of Feigner, WO 91/17424; WO 91/16024. Delivery can be to cells (e.g. in vitro or ex vivo administration) or target tissues (e.g. in vivo administration).

[0850] The preparation of lipid:nucleic acid complexes, including targeted liposomes such as immunolipid complexes, is well known to one of skill in the art (see, e.g., Crystal, Science 270:404-410 (1995); Blaese et al., Cancer Gene Ther. 2:291-297 (1995); Behr et al., Bioconjugate Chem. 5:382-389 (1994); Remy et al., Bioconjugate Chem. 5:647-654 (1994); Gao et al., Gene Therapy 2:710-722 (1995); Ahmad et al., Cancer Res. 52:4817-4820 (1992); U.S. Pat. Nos. 4,186,183, 4,217,344, 4,235,871, 4,261,975, 4,485,054, 4,501,728, 4,774,085, 4,837,028, and 4,946,787).

[0851] The use of RNA or DNA viral based systems for the delivery of nucleic acids take advantage of highly evolved processes for targeting a virus to specific cells in the body and trafficking the viral payload to the nucleus. Viral vectors can be administered directly to patients (in vivo) or they can be used to treat cells in vitro, and the modified cells may optionally be administered to patients (ex vivo). Conventional viral based systems could include retroviral, lentivirus, adenoviral, adeno-associated and herpes simplex virus vectors for gene transfer. Integration in the host genome is possible with the retrovirus, lentivirus, and adeno-associated virus gene transfer methods, often resulting in long term expression of the inserted transgene. Additionally, high transduction efficiencies have been observed in many different cell types and target tissues.

[0852] The tropism of a viruses can be altered by incorporating foreign envelope proteins, expanding the potential target population of target cells. Lentiviral vectors are retroviral vectors that are able to transduce or infect non-dividing cells and typically produce high viral titers. Selection of a retroviral gene transfer system would therefore depend on the target tissue. Retroviral vectors are comprised of cis-acting long terminal repeats with packaging capacity for up to 6-10 kb of foreign sequence. The minimum cis-acting LTRs are sufficient for replication and packaging of the vectors, which are then used to integrate the therapeutic gene into the target cell to provide permanent transgene expression. Widely used retroviral vectors include those based upon murine leukemia virus (MuLV), gibbon ape leukemia virus (GaLV), Simian Immuno deficiency virus (SIV), human immuno deficiency virus (HIV), and combinations thereof (see, e.g., Buchscher et al., J. Virol. 66:2731-2739 (1992); Johann et al., J. Virol. 66:1635-1640 (1992); Sommnerfelt et al., Virol. 176:58-59 (1990); Wilson et al., J. Virol. 63:2374-2378 (1989); Miller et al., J. Virol. 65:2220-2224 (1991); PCT/US94/05700). In applications where transient expression is preferred, adenoviral based systems may be used. Adenoviral based vectors are capable of very high transduction efficiency in many cell types and do not require cell division. With such vectors, high titer and levels of expression have been obtained. This vector can be produced in large quantities in a relatively simple system. Adeno-associated virus (“AAV”) vectors may also be used to transduce cells with target nucleic acids, e.g., in the in vitro production of nucleic acids and peptides, and for in vivo and ex vivo gene therapy procedures (see, e.g., West et al., Virology 160:38-47 (1987); U.S. Pat. No. 4,797,368; WO 93/24641; Kotin, Human Gene Therapy 5:793-801 (1994); Muzyczka, J. Clin. Invest. 94:1351 (1994). Construction of recombinant AAV vectors are described in a number of publications, including U.S. Pat. No. 5,173,414; Tratschin et al., Mol. Cell. Biol. 5:3251-3260 (1985); Tratschin, et al., Mol. Cell. Biol. 4:2072-2081 (1984); Hermonat & Muzyczka, PNAS 81:6466-6470 (1984); and Samulski et al., J. Virol. 63:03822-3828 (1989).

[0853] Packaging cells are typically used to form virus particles that are capable of infecting a host cell. Such cells include 293 cells, which package adenovirus, and W2 cells or PA317 cells, which package retrovirus. Viral vectors used in gene therapy are usually generated by producing a cell line that packages a nucleic acid vector into a viral particle. The vectors typically contain the minimal viral sequences required for packaging and subsequent integration into a host, other viral sequences being replaced by an expression cassette for the polynucleotide(s) to be expressed. The missing viral functions are typically supplied in trans by the packaging cell line. For example, AAV vectors used in gene therapy typically only possess ITR sequences from the AAV genome which are required for packaging and integration into the host genome. Viral DNA is packaged in a cell line, which contains a helper plasmid encoding the other AAV genes, namely rep and cap, but lacking ITR sequences. The cell line may also be infected with adenovirus as a helper. The helper virus promotes replication of the AAV vector and expression of AAV genes from the helper plasmid. The helper plasmid is not packaged in significant amounts due to a lack of ITR sequences. Contamination with adenovirus can be reduced by, e.g., heat treatment to which adenovirus is more sensitive than AAV. Additional methods for the delivery of nucleic acids to cells are known to those skilled in the art. See, for example, US20030087817, incorporated herein by reference.

[0854] In various embodiments, the PE constructs (including, the split-constructs) may be engineered for delivery in one or more rAAV vectors. An rAAV as related to any of the methods and compositions provided herein may be of any serotype including any derivative or pseudotype (e.g., 1, 2, 3, 4, 5, 6, 7, 8, 9, 10, 11, 12, 13, 2/1, 2/5, 2/8, 2/9, 3/1, 3/5, 3/8, or 3/9). An rAAV may comprise a genetic load (i.e., a recombinant nucleic acid vector that expresses a gene of interest, such as a whole or split Prime editor that is carried by the rAAV into a cell) that is to be delivered to a cell. An rAAV may be chimeric.

[0855] As used herein, the serotype of an rAAV refers to the serotype of the capsid proteins of the recombinant virus. Non-limiting examples of derivatives and pseudotypes include rAAV2/1, rAAV2/5, rAAV2/8, rAAV2/9, AAV2-AAV3 hybrid, AAVrh.10, AAVhu.14, AAV3a/3b, AAVrh32.33, AAV-HSC15, AAV-HSC17, AAVhu.37, AAVrh.8, CHt-P6, AAV2.5, AAV6.2, AAV2i8, AAV-HSC15/17, AAVM41, AAV9.45, AAV6(Y445F/Y731F), AAV2.5T, AAV-HAE1/2, AAV clone 32/83, AAVShH10, AAV2 (Y->F), AAV8 (Y733F), AAV2.15, AAV2.4, AAVM41, and AAVr3.45. A non-limiting example of derivatives and pseudotypes that have chimeric VP1 proteins is rAAV2/5-1VPlu, which has the genome of AAV2, capsid backbone of AAV5 and VPlu of AAV1. Other non-limiting example of derivatives and pseudotypes that have chimeric VP1 proteins are rAAV2/5-8VPlu, rAAV2/9-1VPlu, and rAAV2/9-8VPlu.

[0856] AAV derivatives/pseudotypes, and methods of producing such derivatives/pseudotypes are known in the art (see, e.g., Mol Ther. 2012 April; 20(4):699-708. doi: 10.1038/mt.2011.287. Epub 2012 Jan. 24. The AAV vector toolkit: poised at the clinical crossroads. Asokan A1, Schaffer D V, Samulski R J.). Methods for producing and using pseudotyped rAAV vectors are known in the art (see, e.g., Duan et al., J. Virol., 75:7662-7671, 2001; Halbert et al., J. Virol., 74:1524-1532, 2000; Zolotukhin et al., Methods, 28:158-167, 2002; and Auricchio et al., Hum. Molec. Genet., 10:3075-3081, 2001).

[0857] Methods of making or packaging rAAV particles are known in the art and reagents are commercially available (see, e.g., Zolotukhin et al. Production and purification of serotype 1, 2, and 5 recombinant adeno-associated viral vectors. Methods 28 (2002) 158-167; and U.S. Patent Publication Numbers US20070015238 and US20120322861, which are incorporated herein by reference; and plasmids and kits available from ATCC and Cell Biolabs, Inc.). For example, a plasmid comprising a gene of interest may be combined with one or more helper plasmids, e.g., that contain a rep gene (e.g., encoding Rep78, Rep68, Rep52 and Rep40) and a cap gene (encoding VP1, VP2, and VP3, including a modified VP2 region as described herein), and transfected into a recombinant cells such that the rAAV particle can be packaged and subsequently purified.

[0858] Recombinant AAV may comprise a nucleic acid vector, which may comprise at a minimum: (a) one or more heterologous nucleic acid regions comprising a sequence encoding a protein or polypeptide of interest or an RNA of interest (e.g., a siRNA or microRNA), and (b) one or more regions comprising inverted terminal repeat (ITR) sequences (e.g., wild-type ITR sequences or engineered ITR sequences) flanking the one or more nucleic acid regions (e.g., heterologous nucleic acid regions). Herein, heterologous nucleic acid regions comprising a sequence encoding a protein of interest or RNA of interest are referred to as genes of interest.

[0859] Any one of the rAAV particles provided herein may have capsid proteins that have amino acids of different serotypes outside of the VPlu region. In some embodiments, the serotype of the backbone of the VP1 protein is different from the serotype of the ITRs and/or the Rep gene. In some embodiments, the serotype of the backbone of the VP1 capsid protein of a particle is the same as the serotype of the ITRs. In some embodiments, the serotype of the backbone of the VP1 capsid protein of a particle is the same as the serotype of the Rep gene. In some embodiments, capsid proteins of rAAV particles comprise amino acid mutations that result in improved transduction efficiency.

[0860] In some embodiments, the nucleic acid vector comprises one or more regions comprising a sequence that facilitates expression of the nucleic acid (e.g., the heterologous nucleic acid), e.g., expression control sequences operatively linked to the nucleic acid. Numerous such sequences are known in the art. Non-limiting examples of expression control sequences include promoters, insulators, silencers, response elements, introns, enhancers, initiation sites, termination signals, and poly(A) tails. Any combination of such control sequences is contemplated herein (e.g., a promoter and an enhancer).

[0861] Final AAV constructs may incorporate a sequence encoding the pegRNA. In other embodiments, the AAV constructs may incorporate a sequence encoding the second-site nicking guide RNA. In still other embodiments, the AAV constructs may incorporate a sequence encoding the second-site nicking guide RNA and a sequence encoding the pegRNA.

[0862] In various embodiments, the pegRNAs and the second-site nicking guide RNAs can be expressed from an appropriate promoter, such as a human U6 (hU6) promoter, a mouse U6 (mU6) promoter, or other appropriate promoter. The pegRNAs and the second-site nicking guide RNAs can be driven by the same promoters or different promoters.

[0863] In some embodiments, a rAAV constructs or the herein compositions are administered to a subject enterally. In some embodiments, a rAAV constructs or the herein compositions are administered to the subject parenterally. In some embodiments, a rAAV particle or the herein compositions are administered to a subject subcutaneously, intraocularly, intravitreally, subretinally, intravenously (IV), intracerebro-ventricularly, intramuscularly, intrathecally (IT), intracisternally, intraperitoneally, via inhalation, topically, or by direct injection to one or more cells, tissues, or organs. In some embodiments, a rAAV particle or the herein compositions are administered to the subject by injection into the hepatic artery or portal vein.

### Split PE Vector-Based Strategies

[0864] In this aspect, the prime editors can be divided at a split site and provided as two halves of a whole/complete prime editor. The two halves can be delivered to cells (e.g., as expressed proteins or on separate expression vectors) and once in contact inside the cell, the two halves form the complete prime editor through the self-splicing action of the inteins on each prime editor half. Split intein sequences can be engineered into each of the halves of the encoded prime editor to facilitate their transplicing inside the cell and the concomitant restoration of the complete, functioning PE.

[0865] These split intein-based methods overcome several barriers to in vivo delivery. For example, the DNA encoding prime editors is larger than the rAAV packaging limit, and so requires special solutions. One such solution is formulating the editor fused to split intein pairs that are packaged into two separate rAAV particles that, when co-delivered to a cell, reconstitute the functional editor protein. Several other special considerations to account for the unique features of prime editing are described, including the optimization of second-site nicking targets and properly packaging prime editors into virus vectors, including lentiviruses and rAAV.

[0866] In this aspect, the prime editors can be divided at a split site and provided as two halves of a whole/complete prime editor. The two halves can be delivered to cells (e.g., as expressed proteins or on separate expression vectors) and once in contact inside the cell, the two halves form the complete prime editor through the self-splicing action of the inteins on each prime editor half. Split intein sequences can be engineered into each of the halves of the encoded prime editor to facilitate their transplicing inside the cell and the concomitant restoration of the complete, functioning PE.

[0867] FIG. 66 depicts one embodiment of a prime editor being provided as two PE half proteins which regenerate as whole prime editor through the self-splicing action of the split-intein halves located at the end or beginning of each of the prime editor half proteins. As used herein, the term “PE N-terminal half” refers to the N-terminal half of a complete prime editor and which comprises the “N intein” at the C-terminal end of the PE N-terminal half (i.e., the N-terminal extein) of the complete prime editor. The “N intein” refers to the N-terminal half of a complete, fully-formed split-intein moiety. As used herein, the term “PE C-terminal half” refers to the C-terminal half of a complete prime editor and which comprises the “C intein” at the N-terminal end of the C-terminal half (i.e., the C-terminal extein) of a complete prime editor. When the two half proteins, i.e., the PE N-terminal half and the PE C-terminal half, come into contact with one another, e.g., within the cell, the N intein and the C intein undergo the simultaneous process of self-excision and the formation of a peptide bond between the C-terminal end of the PE N-terminal half and the N-terminal end of the PE C-terminal half to reform the complete prime editor protein comprising the complete napDNAbp domain (e.g., Cas9 nickase) and the RT domain. Although not shown in the drawing, the prime editor may also comprise additional sequences including NLS at the N-terminus and/or C-terminus, as well as amino acid linkers sequences joining each domain.

[0868] In various embodiments, the prime editors may be engineered as two half proteins (i.e., a PE N-terminal half and a PE C-terminal half) by “splitting” the whole prime editor as a “split site.” The “split site” refers to the location of insertion of split intein sequences (i.e., the N intein and the C intein) between two adjacent amino acid residues in the prime editor. More specifically, the “split site” refers to the location of dividing the whole prime editor into two separate halves, wherein in each halve is fused at the split site to either the N intein or the C intein motifs. The split site can be at any suitable location in the prime editor, but preferably the split site is located at a position that allows for the formation of two half proteins which are appropriately sized for delivery (e.g., by expression vector) and wherein the inteins, which are fused to each half protein at the split site termini, are available to sufficiently interact with one another when one half protein contacts the other half protein inside the cell.

[0869] In some embodiments, the split site is located in the napDNAbp domain. In other embodiments, the split site is located in the RT domain. In other embodiments, the split site is located in a linker that joins the napDNAbp domain and the RT domain.

[0870] In various embodiments, split site design requires finding sites to split and insert an N- and C-terminal intein that are both structurally permissive for purposes of packaging the two half prime editor domains into two different AAV genomes. Additionally, intein residues necessary for trans splicing can be incorporated by mutating residues at the N terminus of the C terminal extein or inserting residues that will leave an intein “scar.”

[0871] Exemplary split configurations of split prime editors comprising either the SpCas9 nickase or the SaCas9 nickase are as follows.

S. PYOGENES PE, SPLIT AT LINKER, N TERMINAL PORTION
STRUCTURE: [N EXTEIN]-[N INTEIN]
MKRTADGSEFESPKKKRKVDKKYSIGLDIGTNSVGWAVITDEYKVPSKKFKVLG
NTDRHSIKKNLIGALLFDSGETAEATRLKRTARRRYTRRKNRICYLQEIFSNEM
AKVDDSFFHRLEESFLVEEDKKHERHPIFGNIVDEVAYHEKYPTIYHLRKKLVD
STDKADLRLIYLALAHMIKFRGHFLIEGDLNPDNSDVDKLFIQLVQTYNQLFE
ENPINASGVDAKAILSARLSKSRRLENLIAQLPGEKKNGLFGNLIALSLGLTPN
FKSNFDLAEDAKLQLSKDTYDDDLDNLLAQIGDQYADLFLAAKNLSDAILLSDI
LRVNTEITKAPLSASMIKRYDEHHQDLTLLKALVRQQLPEKYKEIFFDQSKNG
YAGYIDGGASQEEFYKFIKPILEKMDGTEELLVKLNREDLLRKQRTFDNGSIP
HQIHLGELHAILRRQEDFYPFLKDNREKIEKILTFRIPYYVGPLARGNSRFAWM
TRKSEETITPWNFEEVVDKGASAQSFIERMTNFDKNLPNEKVLPKHSLLYEYF
TVYNELTKVKYVTEGMRKPAFLSGEQKKAIVDLLFKTNRKVTVKQLKEDYF
KKIECFDSVEISGVEDRFNASLGTYHDLLKIIKDKDFLDNEENEDILEDIVLTLT
LFEDREMIEERLKTYAHLFDDKVMKQLKRRRYTGWGRLSRKLINGIRDKQSG
KTILDFLKSDGFANRNFMQLIHDDSLTFKEDIQKAQVSGQGDSLHEHIANLAG
SPAIKKGILQTVKVVDELVKVMGRHKPENIVIEMARENQTTQKGQKNSRERM
KRIEEGIKELGSQILKEHPVENTQLQNEKLYLYYLQNGRDMYVDQELDINRLS
DYDVDAIVPQSFLKDDSIDNKVLTRSDKNRGKSDNVPSEEVVKKMKNYWRQL
LNAKLITQRKFDNLTKAERGGLSELDKAGFIKRQLVETRQITKHVAQILDSRM
NTKYDENDKLIREVKVITLKSKLVSDFRKDFQFYKVREINNYHHAHDAYLNAV
VGTALIKKYPKLESEFVYGDYKVYDVRKMIAKSEQEIGKATAKYFFYSNIMNF
FKTEITLANGEIRKRPLIETNGETGEIVWDKGRDFATVRKVLSMPQVNIVKKT
EVQTGGFSKESILPKRNSDKLIARKKDWDPKKYGGFDSPTVAYSVLVVAKVEK
GKSKKLKSVKELLGITIMERSSFEKNPIDFLEAKGYKEVKKDLIIKLPKYSLFE
LENGRKRMLASAGELQKGNELALPSKYVNFLYLASHYEKLKGSPEDNEQKQL
FVEQHKHYLDEIIEQISEFSKRVILADANLDKVLSAYNKHRDKPIREQAENIIHL
FTLTNLGAPAAFKYFDTTIDRKRYTSTKEVLDATLIHQSITGLYETRIDLSQLGG
DSGGSSGGSCLSYETEILTVEYGLLPIGKIVEKRIECTVYSVDNNGNIYTQPVAQWH
DRGEQEVFEYCLEDGSLIRATKDHKFMTVDGQMLPIDEIFERELDLMRVDNLPNSG
GSKRTADGSEFEPKKKRKV(SEQ ID NO: 381)
KEY:
NLS (SEQ ID NO: 29, 155)
CAS9 (SEQ ID NO: 31)
LINKER (SEQ ID NO: 9)
NPUN INTEIN (SEQ ID NO: 382)
S. PYOGENES PE, SPLIT AT LINKER, C TERMINAL PORTION
STRUCTURE: [C INTEIN]-[C EXTEIN]
MKRTADGSEFESPKKKRKVIKIATRKYLGKQNVYDIGVERDHNFALKNGFIASNCFNS
GSETPGTSESATPESSGGSSGGSSTLNIEDEYRLHETSKEPDVSLGSTWLSDFPQAWA
ETGGMGLAVRQAPLIIPLKATSTPVSIKQYPMSQEARLGIKPHIQRLLDQGILVPCQSPW
NTPLLPVKKPGTNDYRPVQDLREVNKRVEDIHPTVPNPYNLLSGLPPSHQWYTVLDLKD
AFFCLRLHPTSQPLFAFEWRDPEMGISGQLTWTRLPQGFKNSPTLFDEALHRDLADFRI
QHPDLILLQYVDDLLLAATSELDCQQGTRALLQTLGNLGYRASAKKAQICQKQVKYLGY
LLKEGQRWLTEARKETVMGQPTPKTPRQLREFLGTAGFCRLWIPGFAEMAAPLYPLTKT
GTLFNWGPDQQKAYQEIKQALLTAPALGLPDLTKPFELFVDEKQGYAKGVLTQKLGPW
RRPVAYLSKKLDPVAAGWPPCLRMVAAIAVLTKDAGKLTMGQPLVILAPHAVEALVKQP
PDRWLSNARMTHYQALLLDTDRVQFGPVVALNPATLLPLPEEGLQHNCLDILAEAHGTR
PDLTDQPLPDADHTWYTDGSSLLQEGQRKAGAAVTTETEVIWAKALPAGTSAQRAELIA
LTQALKMAEGKKLNVYTDSRYAFATAHIHGEIYRRRGLLTSEGKEIKNKDEILALLKALFL
PKRLSIIHCPGHQKGHSAEARGNRMADQAARKAAITETPDTSTLLIENSSPSGGSKRTA
DGSEFEPKKKRKV(SEQ ID NO: 383)
KEY:
NLS (SEQ ID NO: 29, 155)
LINKER 1 (SEQ ID NO: 384)
LINKER 2 (SEQ ID NO: 8)
NPUC INTEIN (SEQ ID NO: 385)
RT (SEQ ID NO: 32)
S. AUREUS PE, SPLIT BETWEEN RESIDUES 740/741, N TERMINAL
PORTION STRUCTURE: [N EXTEIN]-[N INTEIN]
MKRTADGSEFESPKKKRKVGKRNYILGLAIGITSVGYGIIDYETRDVIDAGVRLF
KEANVENNEGRRSKRGARRLKRRRRHRIQRVKKLLFDYNLLTDHSELSGINP
YEARVKGLSQKLSEEEFSAALLHLAKRRGVHNVNEVEEDTGNELSTKEQISRN
SKALEEKYVAELQLERLKKDGEVRGSINRFKTSDYVKEAKQLLKVQKAYHQL
DQSFIDTYIDLLETRRTYYEGPGEGSPFGWKDIKEWYEMLMGHCTYFPEELR
SVKYAYNADLYNALNDLNNLVITRDENEKLEYYEKFQIIENVFKQKKKPTLKQ
IAKEILVNEEDIKGYRVTSTGKPEFTNLKVYHDIKDITARKEIIENAELLDQIAKI
LTIYQSSEDIQEELTNLNSELTQEEIEQISNLKGYTGTHNLSLKAINLILDELWH
TNDNQIAIFNRLKLVPKKVDLSQQKEIPTTLVDDFILSPVVKRSFIQSIKVINAII
KKYGLPNDIIIELAREKNSKDAQKMINEMQKRNRQTNERIEEIIRTTGKENAK
YLIEKIKLHDMQEGKCLYSLEAIPLEDLLNNPFNYEVDHIIPRSVSFDNSFNNKV
LVKQEENSKKGNRTPFQYLSSSDSKISYETFKKHILNLAKGKGRISKTKKEYLL
EERDINRFSVQKDFINRNLVDTRYATRGLMNLLRSYFRVNNLDVKVKSINGGF
TSFLRRKWKFKKERNKGYKHHAEDALIIANADFIFKEWKKLDKAKKVMENQ
MFEEKQAECLSYETEILTVEYGLLPIGKIVEKRIECTVYSVDNNGNIYTQPVAQWH
DRGEQEVFEYCLEDGSLIRATKDHKFMTVDGQMLPIDEIFERELDLMRVDNLPNSG
GSKRTADGSEFEPKKKRKV(SEQ ID NO: 386)
KEY:
NLS (SEQ ID NO: 29, 155)
CAS9 (SEQ ID NO: 387)
LINKER (SEQ ID NO: 8)
NPUN INTEIN (SEQ ID NO: 388)
S. AUREUS PE, SPLIT BETWEEN RESIDUES 740/741, C TERMINAL
PORTION STRUCTURE: [C INTEIN]-[C EXTEIN]
MKRTADGSEFESPKKKRKVIKIATRKYLGKQNVYDIGVERDHNFALKNGFIASNCFNE
IETEQEYKEIFITPHQIKHIKDFKDYKYSHRVDKKPNRKLINDTLYSTRKDDKG
NTLIVNNLNGLYDKDNDKLKKLINKSPEKLLMYHHDPQTYQKLKLIMEQYGD
EKNPLYKYYEETGNYLTKYSKKDNGPVIKKIKYYGNKLNAHLDITDDYPNSRN
KVVKLSLKPYRFDVYLDNGVYKFVTVKNLDVIKKENYYEVNSKCYEEAKKLK
KISNQAEFIASFYKNDLIKINGELYRVIGVNNDLLNRIEVNMIDITYREYLENMN
DKRPPHIIKTIASKTQSIKKYSTDILGNLYEVKSKKHPQIIKKGSGGSSGGSSGS
ETPGTSESATPESSGGSSGGSSTLNIEDEYRLHETSKEPDVSLGSTWLSDFPQAWAET
GGMGLAVRQAPLIIPLKATSTPVSIKQYPMSQEARLGIKPHIQRLLDQGILVPCQSPWNT
PLLPVKKPGTNDYRPVQDLREVNKRVEDIHPTVPNPYNLLSGLPPSHQWYTVLDLKDAF
FCLRLHPTSQPLFAFEWRDPEMGISGQLTWTRLPQGFKNSPTLFDEALHRDLADFRIQ
HPDLILLQYVDDLLLAATSELDCQQGTRALLQTLGNLGYRASAKKAQICQKQVKYLGYL
LKEGQRWLTEARKETVMGQPTPKTPRQLREFLGTAGFCRLWIPGFAEMAAPLYPLTKT
GTLFNWGPDQQKAYQEIKQALLTAPALGLPDLTKPFELFVDEKQGYAKGVLTQKLGPW
RRPVAYLSKKLDPVAAGWPPCLRMVAAIAVLTKDAGKLTMGQPLVILAPHAVEALVKQP
PDRWLSNARMTHYQALLLDTDRVQFGPVVALNPATLLPLPEEGLQHNCLDILAEAHGTR
PDLTDQPLPDADHTWYTDGSSLLQEGQRKAGAAVTTETEVIWAKALPAGTSAQRAELIA
LTQALKMAEGKKLNVYTDSRYAFATAHIHGEIYRRRGLLTSEGKEIKNKDEILALLKALFL
PKRLSIIHCPGHQKGHSAEARGNRMADQAARKAAITETPDTSTLLIENSSPSGGSKRTA
DGSEFEPKKKRKV(SEQ ID NO: 389)
KEY:
NLS (SEQ ID NO: 29, 155)
CAS9 (SEQ ID NO: 390)
LINKER 1 (SEQ ID NO: 11)
LINKER 2 (SEQ ID NO: 8)
NPUC INTEIN (SEQ ID NO: 385)
RT (SEQ ID NO: 32)

[0872] In various embodiments, using SpCas9 nickase (SEQ ID NO: 37, 1368 amino acids) as an example, the split can between any two amino acids between 1 and 1368. Preferred splits, however, will be located between the central region of the protein, e.g., from amino acids 50-1250, or from 100-1200, or from 150-1150, or from 200-1100, or from 250-1050, or from 300-1000, or from 350-950, or from 400-900, or from 450-850, or from 500-800, or from 550-750, or from 600-700 of SEQ ID NO: 37. In specific exemplary embodiments, the split site may be between 740/741, or 801/802, or 1010/1011, or 1041/1042. In other embodiments the split site may be between 1/2, 2/3, 3/4, 4/5, 5/6, 6/7, 7/8, 8/9, 9/10, 10/11, 12/13, 14/15, 15/16, 17/18, 19/20, 20/21, 21/22, 22/23, 23/24, 24/25, 25/26, 26/27, 27/28, 28/29, 29/30, 30/31, 31/32, 32/33, 33/34, 34/35, 35/36, 36/37, 38/39, 39/40, 41/42, 42/43, 43/44, 44/45, 45/46, 46/47, 47/48, 48/49, 49/50, 51/52, 52/53, 53/54, 54/55, 55/56, 56/57, 57/58, 58/59, 59/60, 61/62, 62/63, 63/64, 64/65, 65/66, 66/67, 67/68, 68/69, 69/70, 71/72, 72/73, 73/74, 74/75, 75/76, 76/77, 77/78, 78/79, 79/80, 81/82, 82/83, 83/84, 84/85, 85/86, 86/87, 87/88, 88/89, 89/90, or between any two pairs of adjacent residues between 90-100, 100-150, 150-200, 200-250, 250-300, 300-350, 350-400, 450-500, 500-550, 550-600, 600-650, 650-700, 700-750, 750-800, 800-850, 850-900, 900-950, 950-1000, 1000-1050, 1050-1100, 1100-1150, 1150-1200, 1200-1250, 1250-1300, 1300-1350, and 1350-1368, relative to SpCas9 of SEQ ID NO: 37, at between any two corresponding residues in an amino acid sequence having at least 80%, 85%, 90%, 95%, 98%, 99%, or 99.9% sequence identity with SEQ ID NO: 37, or between any two corresponding residues in a variant or equivalent of SpCas9 of any of amino acid sequences SEQ ID NOs. 31, 37-38, 40, 42, 44-99, or an amino acid sequence having at least 80%, 85%, 90%, 95%, 98%, 99%, or 99.9% sequence identity with any of SEQ ID NOs: 31, 37-38, 40, 42, 44-99.

[0873] In various embodiments, the split intein sequences can be engineered by from the intein sequences represented by SEQ ID NOs: 16-23.

[0874] In various other embodiments, the split intein sequences can be used as follows:

| INTEIN-N | INTEIN-C |
|---|---|
| NPU-N | NPU-C |
| CLSYETEILTVEYGLLPIGK | IKIATRKYLGKQNVYDIG |
| IVEKRIECTVYSVDNNGNIY | VERDHNFALKNGFIASN |
| TQPVAQWHDRGEQEVFEYCL | (SEQ ID NO: 385) |
| EDGSLIRATKDHKFMTVDGQ | |
| MLPIDEIFERELDLMRVDNL | |
| PNSGGS | |
| (SEQ ID NO: 382) | |

[0875] In various embodiments, the split inteins can be used to separately deliver separate portions of a complete Prime editor to a cell, which upon expression in a cell, become reconstituted as a complete Prime editor through the trans splicing.

[0876] In some embodiments, the disclosure provides a method of delivering a Prime editor to a cell, comprising:
[0877] (a) constructing a first expression vector encoding an N-terminal fragment of the Prime editor fused to a first split intein sequence;
[0878] (b) constructing a second expression vector encoding a C-terminal fragment of the Prime editor fused to a second split intein sequence;
[0879] (c) delivering the first and second expression vectors to a cell,
   wherein the N-terminal and C-terminal fragment are reconstituted as the Prime editor in the cell as a result of trans splicing activity causing self-excision of the first and second split intein sequences.

[0880] The split site in some embodiments can be anywhere in the prime editor fusion, including the napDNAbp domain, the linker, or the reverse transcriptase domain.

[0881] In other embodiments, the split site is in the napDNAbp domain.

[0882] In still other embodiments, the split site is in the reverse transcriptase or polymerase domain.

[0883] In yet other embodiments, the split site is in the linker.

[0884] In various embodiments, the present disclosure provides prime editors comprising a napDNAbp (e.g., a Cas9 domain) and a reverse transcriptase wherein one or both of the napDNAbp and/or the reverse transcriptase comprise an intein, for example, a ligand-dependent intein. Typically the intein is a ligand-dependent intein which exhibits no or minimal protein splicing activity in the absence of ligand (e.g., small molecules such as 4-hydroxytamoxifen, peptides, proteins, polynucleotides, amino acids, and nucleotides). Ligand-dependent inteins are known, and include those described in U.S. patent application U.S. Ser. No. 14/004,280, published as U.S. 2014/0065711 A1, the entire contents of which are incorporated herein by reference. In addition, use of split-Cas9 architecture In some embodiments, the intein comprises an amino acid sequence selected from the group consisting of SEQ ID NOs: 16-23, 382, 385, 388.

[0885] In various embodiments, the napDNAbp domains are smaller-sized napDNAbp domains as compared to the canonical SpCas9 domain of SEQ ID NO: 37.

[0886] The canonical SpCas9 protein is 1368 amino acids in length and has a predicted molecular weight of 158 kilodaltons. The term “small-sized Cas9 variant”, as used herein, refers to any Cas9 variant—naturally occurring, engineered, or otherwise—that is less than at least 1300 amino acids, or at least less than 1290 amino acids, or than less than 1280 amino acids, or less than 1270 amino acid, or less than 1260 amino acid, or less than 1250 amino acids, or less than 1240 amino acids, or less than 1230 amino acids, or less than 1220 amino acids, or less than 1210 amino acids, or less than 1200 amino acids, or less than 1190 amino acids, or less than 1180 amino acids, or less than 1170 amino acids, or less than 1160 amino acids, or less than 1150 amino acids, or less than 1140 amino acids, or less than 1130 amino acids, or less than 1120 amino acids, or less than 1110 amino acids, or less than 1100 amino acids, or less than 1050 amino acids, or less than 1000 amino acids, or less than 950 amino acids, or less than 900 amino acids, or less than 850 amino acids, or less than 800 amino acids, or less than 750 amino acids, or less than 700 amino acids, or less than 650 amino acids, or less than 600 amino acids, or less than 550 amino acids, or less than 500 amino acids, but at least larger than about 400 amino acids and retaining the required functions of the Cas9 protein.

[0887] In one embodiment, as depicted in Example 20, the specification embraces the following split-intein PE constructs, which are split between residues 1024 and 1025 of the canonical SpCas9 (SEQ ID NO: 37) (or which may be referred to as residues 1023 and 1024, respectively, relative to a Met-minus SEQ ID NO: 37).

[0888] First, the amino acid sequence of SEQ ID NO: 37 is shown as follows, indicating the location of the split site between 1024 (“K”) and 1025 (“S”) residues:

| Descrip- | | SEQ ID |
|---|---|---|
| tion | Sequence | NO: |
| SpCas9 | MDKKYSIGLDIGTNSVGWAV | SEQ ID |
| Strepto- | ITDEYKVPSKKFKVLGNTDR | NO: 37, |
| coccus | HSIKKNLIGALLFDSGETAE | indi- |
| pyogenes | ATRLKRTARRRYTRRKNRIC | cated |
| M1 | YLQEIFSNEMAKVDDSFFHR | with |
| Swiss- | LEESFLVEEDKKHERHPIFG | split |
| Prot | NIVDEVAYHEKYPTIYHLRK | site |
| Acces- | KLVDSTDKADLRLIYLALAH | 1024/ |
| sion | MIKFRGHFLIEGDLNPDNSD | 1025 |
| No. | VDKLFIQLVQTYNQLFEENP | in |
| Q99ZW2 | INASGVDAKAILSARLSKSR | bold |
| Wild | RLENLIAQLPGEKKNGLFGN | The M |
| type | LIALSLGLTPNFKSNFDLAE | at |
| | DAKLQLSKDTYDDDLDNLLA | posi- |
| | QIGDQYADLFLAAKNLSDAI | tion 1 |
| | LLSDILRVNTEITKAPLSAS | is not |
| | MIKRYDEHHQDLTLLKALVR | neces- |
| | QQLPEKYKEIFFDQSKNGYA | sarily |
| | GYIDGGASQEEFYKFIKPIL | present |
| | EKMDGTEELLVKLNREDLLR | in the |
| | KQRTFDNGSIPHQIHLGELH | Prime |
| | AILRRQEDFYPFLKDNREKI | editor |
| | EKILTFRIPYYVGPLARGNS | in |
| | RFAWMTRKSEETITPWNFEE | certain |
| | VVDKGASAQSFIERMTNFDK | embod- |
| | NLPNEKVLPKHSLLYEYFTV | iments. |
| | YNELTKVKYVTEGMRKPAFL | Thus, |
| | SGEQKKAIVDLLFKTNRKVT | the |
| | VKQLKEDYFKKIECFDSVEI | number- |
| | SGVEDRFNASLGTYHDLLKI | ing of |
| | IKDKDFLDNEENEDILEDIV | the |
| | LTLTLFEDREMIEERLKTYA | split |
| | HLFDDKVMKQLKRRRYTGWG | site is |
| | RLSRKLINGIRDKQSGKTIL | 1023/ |
| | DFLKSDGFANRNFMQLIHDD | 1024 |
| | SLTFKEDIQKAQVSGQGDSL | in the |
| | HEHIANLAGSPAIKKGILQT | case |
| | VKVVDELVKVMGRHKPENIV | that |
| | IEMARENQTTQKGQKNSRER | the |
| | MKRIEEGIKELGSQILKEHP | amino |
| | VENTQLQNEKLYLYYLQNGR | acid |
| | DMYVDQELDINRLSDYDVDH | se- |
| | IVPQSFLKDDSIDNKVLTRS | quence |
| | DKNRGKSDNVPSEEVVKKMK | ex- |
| | NYWRQLLNAKLITQRKFDNL | cludes |
| | TKAERGGLSELDKAGFIKRQ | Met at |
| | LVETRQITKHVAQILDSRMN | posi- |
| | TKYDENDKLIREVKVITLKS | tion 1. |
| | KLVSDFRKDFQFYKVREINN | |
| | YHHAHDAYLNAVVGTALIKK | |
| | YPKLESEFVYGDYKVYDVRK | |
| | MIAKSEQEIGKATAKYFFYS | |
| | NIMNFFKTEITLANGEIRKR | |
| | PLIETNGETGEIVWDKGRDF | |
| | ATVRKVLSMPQVNIVKKTEV | |
| | QTGGFSKESILPKRNSDKLI | |
| | ARKKDWDPKKYGGFDSPTVA | |
| | YSVLVVAKVEKGKSKKLKSV | |
| | KELLGITIMERSSFEKNPID | |
| | FLEAKGYKEVKKDLIIKLPK | |
| | YSLFELENGRKRMLASAGEL | |
| | QKGNELALPSKYVNFLYLAS | |
| | HYEKLKGSPEDNEQKQLFVE | |
| | QHKHYLDEIIEQISEFSKRV | |
| | ILADANLDKVLSAYNKHRDK | |
| | PIREQAENIIHLFTLTNLGA | |
| | PAAFKYFDTTIDRKRYTSTK | |
| | EVLDATLIHQSITGLYETRI | |
| | DLSQLGGD | |

[0889] In this configuration, the amino acid sequence of N-terminal half (amino acids 1-1024) is as follows:

(SEQ ID NO: 391)
MDKKYSIGLDIGTNSVGWAVITDEYKVPSKKFKVLGNTDRHSIKKNLIGA
LLFDSGETAEATRLKRTARRRYTRRKNRICYLQEIFSNEMAKVDDSFFHR
LEESFLVEEDKKHERHPIFGNIVDEVAYHEKYPTIYHLRKKLVDSTDKAD
LRLIYLALAHMIKFRGHFLIEGDLNPDNSDVDKLFIQLVQTYNQLFEENP
INASGVDAKAILSARLSKSRRLENLIAQLPGEKKNGLFGNLIALSLGLTP
NFKSNFDLAEDAKLQLSKDTYDDDLDNLLAQIGDQYADLFLAAKNLSDAI
LLSDILRVNTEITKAPLSASMIKRYDEHHQDLTLLKALVRQQLPEKYKEI
FFDQSKNGYAGYIDGGASQEEFYKFIKPILEKMDGTEELLVKLNREDLLR
KQRTFDNGSIPHQIHLGELHAILRRQEDFYPFLKDNREKIEKILTFRIPY
YVGPLARGNSRFAWMTRKSEETITPWNFEEVVDKGASAQSFIERMTNFDK
NLPNEKVLPKHSLLYEYFTVYNELTKVKYVTEGMRKPAFLSGEQKKAIVD
LLFKTNRKVTVKQLKEDYFKKIECFDSVEISGVEDRFNASLGTYHDLLKI
IKDKDFLDNEENEDILEDIVLTLTLFEDREMIEERLKTYAHLFDDKVMKQ
LKRRRYTGWGRLSRKLINGIRDKQSGKTILDFLKSDGFANRNFMQLIHDD
SLTFKEDIQKAQVSGQGDSLHEHIANLAGSPAIKKGILQTVKVVDELVKV
MGRHKPENIVIEMARENQTTQKGQKNSRERMKRIEEGIKELGSQILKEHP
VENTQLQNEKLYLYYLQNGRDMYVDQELDINRLSDYDVDAIVPQSFLKDD
SIDNKVLTRSDKNRGKSDNVPSEEVVKKMKNYWRQLLNAKLITQRKFDNL
TKAERGGLSELDKAGFIKRQLVETRQITKHVAQILDSRMNTKYDENDKLI
REVKVITLKSKLVSDFRKDFQFYKVREINNYHHAHDAYLNAVVGTALIKK
YPKLESEFVYGDYKVYDVRKMIAK.

[0890] In this configuration, the amino acid sequence of N-terminal half (amino acids 1-1023) (where the protein is Met-minus at position 1) is as follows:

(SEQ ID NO: 392)
DKKYSIGLDIGTNSVGWAVITDEYKVPSKKFKVLGNTDRHSIKKNLIGAL
LFDSGETAEATRLKRTARRRYTRRKNRICYLQEIFSNEMAKVDDSFFHRL
EESFLVEEDKKHERHPIFGNIVDEVAYHEKYPTIYHLRKKLVDSTDKADL
RLIYLALAHMIKFRGHFLIEGDLNPDNSDVDKLFIQLVQTYNQLFEENPI
NASGVDAKAILSARLSKSRRLENLIAQLPGEKKNGLFGNLIALSLGLTPN
FKSNFDLAEDAKLQLSKDTYDDDLDNLLAQIGDQYADLFLAAKNLSDAIL
LSDILRVNTEITKAPLSASMIKRYDEHHQDLTLLKALVRQQLPEKYKEIF
FDQSKNGYAGYIDGGASQEEFYKFIKPILEKMDGTEELLVKLNREDLLRK
QRTFDNGSIPHQIHLGELHAILRRQEDFYPFLKDNREKIEKILTFRIPYY
VGPLARGNSRFAWMTRKSEETITPWNFEEVVDKGASAQSFIERMTNFDKN
LPNEKVLPKHSLLYEYFTVYNELTKVKYVTEGMRKPAFLSGEQKKAIVDL
LFKTNRKVTVKQLKEDYFKKIECFDSVEISGVEDRFNASLGTYHDLLKII
KDKDFLDNEENEDILEDIVLTLTLFEDREMIEERLKTYAHLFDDKVMKQL
KRRRYTGWGRLSRKLINGIRDKQSGKTILDFLKSDGFANRNFMQLIHDDS
LTFKEDIQKAQVSGQGDSLHEHIANLAGSPAIKKGILQTVKVVDELVKVM
GRHKPENIVIEMARENQTTQKGQKNSRERMKRIEEGIKELGSQILKEHPV
ENTQLQNEKLYLYYLQNGRDMYVDQELDINRLSDYDVDAIVPQSFLKDDS
IDNKVLTRSDKNRGKSDNVPSEEVVKKMKNYWRQLLNAKLITQRKFDNLT
KAERGGLSELDKAGFIKRQLVETRQITKHVAQILDSRMNTKYDENDKLIR
EVKVITLKSKLVSDFRKDFQFYKVREINNYHHAHDAYLNAVVGTALIKKY
PKLESEFVYGDYKVYDVRKMIAK.

[0891] In this configuration, the amino acid sequence of C-terminal half (amino acids 1024-1368 (or counted as amino acids 1023-1367 in a Met-minus Cas9) is as follows:

(SEQ ID NO: 393)
SEQEIGKATAKYFFYSNIMNFFKTEITLANGEIRKRPLIETNGETGEIVW
DKGRDFATVRKVLSMPQVNIVKKTEVQTGGFSKESILPKRNSDKLIARKK
DWDPKKYGGFDSPTVAYSVLVVAKVEKGKSKKLKSVKELLGITIMERSSF
EKNPIDFLEAKGYKEVKKDLIIKLPKYSLFELENGRKRMLASAGELQKGN
ELALPSKYVNFLYLASHYEKLKGSPEDNEQKQLFVEQHKHYLDEIIEQIS
EFSKRVILADANLDKVLSAYNKHRDKPIREQAENIIHLFTLTNLGAPAAF
KYFDTTIDRKRYTSTKEVLDATLIHQSITGLYETRIDLSQLGGD.

[0892] As shown in Example 20, the PE2 (which is based on SpCas9 of SEQ ID NO: 37) construct was split at position 1023/1024 (relative to a Met-minus SEQ ID NO: 37) into two separate constructs, as follows:

SpPE2 split at 1023/1024 N terminal half
(SEQ ID NO: 394)
MKRTADGSEFESPKKKRKVDKKYSIGLDIGTNSVGWAVITDEYKVPSKKFKV
LGNTDRHSIKKNLIGALLFDSGETAEATRLKRTARRRYTRRKNRICYLQEIFSNEMAK
VDDSFFHRLEESFLVEEDKKHERHPIFGNIVDEVAYHEKYPTIYHLRKKLVDSTDKAD
LRLIYLALAHMIKFRGHFLIEGDLNPDNSDVDKLFIQLVQTYNQLFEENPINASGVDA
KAILSARLSKSRRLENLIAQLPGEKKNGLFGNLIALSLGLTPNFKSNFDLAEDAKLQLS
KDTYDDDLDNLLAQIGDQYADLFLAAKNLSDAILLSDILRVNTEITKAPLSASMIKRY
DEHHQDLTLLKALVRQQLPEKYKEIFFDQSKNGYAGYIDGGASQEEFYKFIKPILEK
MDGTEELLVKLNREDLLRKQRTFDNGSIPHQIHLGELHAILRRQEDFYPFLKDNREKI
EKILTFRIPYYVGPLARGNSRFAWMTRKSEETITPWNFEEVVDKGASAQSFIERMTNF
DKNLPNEKVLPKHSLLYEYFTVYNELTKVKYVTEGMRKPAFLSGEQKKAIVDLLFK
TNRKVTVKQLKEDYFKKIECFDSVEISGVEDRFNASLGTYHDLLKIIKDKDFLDNEEN
EDILEDIVLTLTLFEDREMIEERLKTYAHLFDDKVMKQLKRRRYTGWGRLSRKLINGI
RDKQSGKTILDFLKSDGFANRNFMQLIHDDSLTFKEDIQKAQVSGQGDSLHEHIANL
AGSPAIKKGILQTVKVVDELVKVMGRHKPENIVIEMARENQTTQKGQKNSRERMKR
IEEGIKELGSQILKEHPVENTQLQNEKLYLYYLQNGRDMYVDQELDINRLSDYDVDA
IVPQSFLKDDSIDNKVLTRSDKNRGKSDNVPSEEVVKKMKNYWRQLLNAKLITQRK
FDNLTKAERGGLSELDKAGFIKRQLVETRQITKHVAQILDSRMNTKYDENDKLIREV
KVITLKSKLVSDFRKDFQFYKVREINNYHHAHDAYLNAVVGTALIKKYPKLESEFVY

[chemical structure]

[chemical structure]

KRTADGSEFEPKKKRKV

[chemical structure]

SpPE2 split at 1023/1024 C terminal half

[chemical structure]

KATAKYFFYSNIMNFFKTEITLANGEIRKRPLIETNGETGEIVWDKGRDFATVRKVLS
MPQVNIVKKTEVQTGGFSKESILPKRNSDKLIARKKDWDPKKYGGFDSPTVAYSVLV
VAKVEKGKSKKLKSVKELLGITIMERSSFEKNPIDFLEAKGYKEVKKDLIIKLPKYSLF
ELENGRKRMLASAGELQKGNELALPSKYVNFLYLASHYEKLKGSPEDNEQKQLFVE
QHKHYLDEIIEQISEFSKRVILADANLDKVLSAYNKHRDKPIREQAENIIHLFTLTNLG

[chemical structure]

[chemical structure]

WAETGGMGLAVRQAPLIIPLKATSTPVSIKQYPMSQEARLGIKPHIQRLLDQGIL
VPCQSPWNTPLLPVKKPGTNDYRPVQDLREVNKRVEDIHPTVPNPYNLLSGLPP
SHQWYTVLDLKDAFFCLRLHPTSQPLFAFEWRDPEMGISGQLTWTRLPQGFKN
SPTLFNEALHRDLADFRIQHPDLILLQYVDDLLLAATSELDCQQGTRALLQTLG
NLGYRASAKKAQICQKQVKYLGYLLKEGQRWLTEARKETVMGQPTPKTPRQL
REFLGKAGFCRLFIPGFAEMAAPLYPLTKPGTLFNWGPDQQKAYQEIKQALLT
APALGLPDLTKPFELFVDEKQGYAKGVLTQKLGPWRRPVAYLSKKLDPVAAG
WPPCLRMVAAIAVLTKDAGKLTMGQPLVILAPHAVEALVKQPPDRWLSNARM
THYQALLLDTDRVQFGPVVALNPATLLPLPEEGLQHNCLDILAEAHGTRPDLTD
QPLPDADHTWYTDGSSLLQEGQRKAGAAVTTETEVIWAKALPAGTSAQRAELI
ALTQALKMAEGKKLNVYTDSRYAFATAHIHGEIYRRRGWLTSEGKEIKNKDEI
LALLKALFLPKRLSIIHCPGHQKGHSAEARGNRMADQAARKAAITETPDTSTLLI

[chemical structure]

[chemical structure]

[0893] The present disclosure also contemplates methods of delivering split-intein prime editors to cells and/or treating cells with split-intein prime editors.

[0894] In some embodiments, the disclosure provides a method of delivering a Prime editor to a cell, comprising:
[0895] (a) constructing a first expression vector encoding an N-terminal fragment of the Prime editor fused to a first split intein sequence;
[0896] (b) constructing a second expression vector encoding a C-terminal fragment of the Prime editor fused to a second split intein sequence;
[0897] (c) delivering the first and second expression vectors to a cell,
   wherein the N-terminal and C-terminal fragment are reconstituted as the Prime editor in the cell as a result of trans splicing activity causing self-excision of the first and second split intein sequences.

[0898] In certain embodiments, the N-terminal fragment of the Prime editor fused to a first split intein sequence is SEQ ID NO: 394, or an amino acid sequence having at least 80%, at least 85%, at least 90%, at least 95%, at least 98%, or at least 99.9% sequence identity with SEQ ID NO: 394.

[0899] In other embodiments, the C-terminal fragment of the Prime editor fused to a first split intein sequence is SEQ ID NO: 395, or an amino acid sequence having at least 80%, at least 85%, at least 90%, at least 95%, at least 98%, or at least 99.9% sequence identity with SEQ ID NO: 395.

[0900] In other embodiments, the disclosure provides a method of editing a target DNA sequence within a cell, comprising:
[0901] (a) constructing a first expression vector encoding an N-terminal fragment of the Prime editor fused to a first split intein sequence;
[0902] (b) constructing a second expression vector encoding a C-terminal fragment of the Prime editor fused to a second split intein sequence;
[0903] (c) delivering the first and second expression vectors to a cell,
   wherein the N-terminal and C-terminal fragment are reconstituted as the Prime editor in the cell as a result of trans splicing activity causing self-excision of the first and second split intein sequences.

[0904] In certain embodiments, the N-terminal fragment of the Prime editor fused to a first split intein sequence is SEQ ID NO: 394, or an amino acid sequence having at least 80%, at least 85%, at least 90%, at least 95%, at least 98%, or at least 99.9% sequence identity with SEQ ID NO: 394.

[0905] In other embodiments, the C-terminal fragment of the Prime editor fused to a first split intein sequence is SEQ ID NO: 395, or an amino acid sequence having at least 80%, at least 85%, at least 90%, at least 95%, at least 98%, or at least 99.9% sequence identity with SEQ ID NO: 395.

### Delivery of PE Ribonucleoprotein Complexes

[0906] In this aspect, the prime editors may be delivered by non-viral delivery strategies involving delivery of a prime editor complexed with a pegRNA (i.e., a PE ribonucleoprotein complex) by various methods, including electroporation and lipid nanoparticles. Methods of non-viral delivery of nucleic acids include lipofection, nucleofection, microinjection, biolistics, virosomes, liposomes, immunoliposomes, polycation or lipid:nucleic acid conjugates, naked DNA, artificial virions, and agent-enhanced uptake of DNA. Lipofection is described in e.g., U.S. Pat. Nos. 5,049,386, 4,946,787; and 4,897,355) and lipofection reagents are sold commercially (e.g., Transfectam™ and Lipofectin™). Cationic and neutral lipids that are suitable for efficient receptor-recognition lipofection of polynucleotides include those of Feigner, WO 91/17424; WO 91/16024. Delivery can be to cells (e.g. in vitro or ex vivo administration) or target tissues (e.g. in vivo administration).

[0907] The preparation of lipid:nucleic acid complexes, including targeted liposomes such as immunolipid complexes, is well known to one of skill in the art (see, e.g., Crystal, Science 270:404-410 (1995); Blaese et al., Cancer Gene Ther. 2:291-297 (1995); Behr et al., Bioconjugate Chem. 5:382-389 (1994); Remy et al., Bioconjugate Chem. 5:647-654 (1994); Gao et al., Gene Therapy 2:710-722 (1995); Ahmad et al., Cancer Res. 52:4817-4820 (1992); U.S. Pat. Nos. 4,186,183, 4,217,344, 4,235,871, 4,261,975, 4,485,054, 4,501,728, 4,774,085, 4,837,028, and 4,946,787).

[0908] Additional reference may be made to the following references that discuss approaches for non-viral delivery of ribonucleoprotein complexes, each of which are incorporated herein by reference.
[0909] Chen, Sean, et al. “Highly efficient mouse genome editing by CRISPR ribonucleoprotein electroporation of zygotes.” Journal of Biological Chemistry (2016): jbc-M116. PubMed
[0910] Zuris, John A., et al. “Cationic lipid-mediated delivery of proteins enables efficient protein-based genome editing in vitro and in vivo.” Nature biotechnology 33.1 (2015): 73. PubMed
[0911] Rouet, Romain, et al. “Receptor-Mediated Delivery of CRISPR-Cas9 Endonuclease for Cell-Type-Specific Gene Editing.” Journal of the American Chemical Society 140.21 (2018): 6596-6603. PubMed.

[0912] FIG. 68C provides data showing that various disclosed PE ribonucleoprotein complexes (PE2 at high concentration, PE3 at high concentration and PE3 at low concentration) can be delivered in this manner.

Delivery of PE by mRNA

[0913] Another method that may be employed to deliver prime editors and/or pegRNAs to cells in which prime editing-based genome editing is desired is by employing the use of messenger RNA (mRNA) delivery methods and technologies. Examples of mRNA delivery methods and compositions that may be utilized in the present disclosure including, for example, PCT/US2014/028330, U.S. Pat. No. 8,822,663B2, NZ700688A, ES2740248T3, EP2755693A4, EP2755986A4, WO2014152940A1, EP3450553B1, BR112016030852A2, and EP3362461A1, each of which are incorporated herein by reference in their entireties. Additional disclosure hereby incorporated by reference can be found in Kowalski et al., “Delivering the Messenger: Advances in Technologies for Therapeutic mRNA Delivery,” Mol Therap., 2019; 27(4): 710-728.

[0914] In contrast to DNA vector encoding prime editors, the use of RNA as delivery agent for prime editors has the advantage that the genetic material does not have to enter the nucleus to perform its function. The delivered mRNA may be directly translated in the cytoplasm into the desired protein (e.g., prime editor) and nucleic acid products (e.g., pegRNA). However, in order to be more stable (e.g., resist RNA-degrading enzymes in the cytoplasm), it is in some embodiments necessary to stabilize the mRNA to improve delivery efficiency. Certain delivery carriers such as cationic lipids or polymeric delivery carriers can also help protect the transfected mRNA from endogenous RNase enzymes that might otherwise degrade the therapeutic mRNA encoding the desired prime editor. In addition, despite the increased stability of modified mRNA, delivery of mRNA, particularly mRNA encoding full-length protein, to cells in vivo in a manner that allows therapeutic levels of protein production remains a challenge.

[0915] With some exceptions, the intracellular delivery of mRNA is generally more challenging than that of small oligonucleotides, and it requires encapsulation into a delivery nanoparticle, in part due to the significantly larger size of mRNA molecules (300-5,000 kDa, ˜1-15 kb) as compared to other types of RNAs (small interfering RNAs [siRNAs], ˜14 kDa; antisense oligonucleotides [ASOs], 4-10 kDa).

[0916] mRNA must cross the cell membrane in order to reach the cytoplasm. The cell membrane is a dynamic and formidable barrier to intracellular delivery. It is made up primarily of a lipid bilayer of zwitterionic and negatively charged phospholipids, where the polar heads of the phospholipids point toward the aqueous environment and the hydrophobic tails form a hydrophobic core.

[0917] In some embodiments, the mRNA compositions of the disclosure comprise mRNA (encoding a prime editor and/or pegRNA), a transport vehicle, and optionally an agent that facilitates contact with the target cell and subsequent transfection.

[0918] In some embodiments, the mRNA can include one or more modifications that confer stability to the mRNA (e.g., compared to the wild-type or native version of the mRNA) and is involved in the associated abnormal expression of the protein. One or more modifications to the wild type that correct the defect may also be included. For example, the nucleic acids of the invention can include modifications of one or both of a 5′ untranslated region or a 3′ untranslated region. Such modifications may include the inclusion of sequences encoding a partial sequence of the cytomegalovirus (CMV) immediate early 1 (IE1) gene, poly A tail, Cap1 structure, or human growth hormone (hGH). In some embodiments, the mRNA is modified to reduce mRNA immunogenicity.

[0919] In one embodiment, the “prime editor” mRNA in the composition of the invention can be formulated in a liposome transfer vehicle to facilitate delivery to target cells. Contemplated transfer vehicles can include one or more cationic lipids, non-cationic lipids, and/or PEG-modified lipids. For example, the transfer vehicle can include at least one of the following cationic lipids: C12-200, DLin-KC2-DMA, DODAP, HGT4003, ICE, HGT5000, or HGT5001. In embodiments, the transfer vehicle comprises cholesterol (chol) and/or PEG modified lipids. In some embodiments, the transfer vehicle comprises DMG-PEG2K. In certain embodiments, the transfer vehicle has the following lipid formulation: C12-200, DOPE, chol, DMG-PEG2K; DODAP, DOPE, cholesterol, DMG-PEG2K; HGT5000, DOPE, chol, DMG-PEG2K, HGT5001, DOPE, chol, one of DMG-PEG2K.

[0920] The present disclosure also provides compositions and methods useful for facilitating transfection of target cells with one or more PE-encoding mRNA molecules. For example, the compositions and methods of the present invention contemplate the use of targeting ligands that can increase the affinity of the composition for one or more target cells. In one embodiment, the targeting ligand is apolipoprotein B or apolipoprotein E, and the corresponding target cells express low density lipoprotein receptors and thus promote recognition of the targeting ligand. A vast number of target cells can be preferentially targeted using the methods and compositions of the present disclosure. For example, contemplated target cells include hepatocytes, epithelial cells, hematopoietic cells, epithelial cells, endothelial cells, lung cells, bone cells, stem cells, mesenchymal cells, nerve cells, heart cells, adipocytes, vascular smooth muscle Includes cells, cardiomyocytes, skeletal muscle cells, beta cells, pituitary cells, synovial lining cells, ovarian cells, testis cells, fibroblasts, B cells, T cells, reticulocytes, leukocytes, granulocytes, and tumor cells However, it is not limited to these.

[0921] In some embodiments, the PE-encoding mRNA may optionally have chemical or biological modifications which, for example, improve the stability and/or half-life of such mRNA or which improve or otherwise facilitate protein production. Upon transfection, a natural mRNA in the compositions of the invention may decay with a half-life of between 30 minutes and several days. The mRNAs in the compositions of the disclosure may retain at least some ability to be translated, thereby producing a functional protein or enzyme. Accordingly, the invention provides compositions comprising and methods of administering a stabilized mRNA. In some embodiments, the activity of the mRNA is prolonged over an extended period of time. For example, the activity of the mRNA may be prolonged such that the compositions of the present disclosure are administered to a subject on a semi-weekly or bi-weekly basis, or more preferably on a monthly, bi-monthly, quarterly or an annual basis. The extended or prolonged activity of the mRNA of the present invention is directly related to the quantity of protein or enzyme produced from such mRNA. Similarly, the activity of the compositions of the present disclosure may be further extended or prolonged by modifications made to improve or enhance translation of the mRNA. Furthermore, the quantity of functional protein or enzyme produced by the target cell is a function of the quantity of mRNA delivered to the target cells and the stability of such mRNA. To the extent that the stability of the mRNA of the present invention may be improved or enhanced, the half-life, the activity of the produced protein or enzyme and the dosing frequency of the composition may be further extended.

[0922] Accordingly, in some embodiments, the mRNA in the compositions of the disclosure comprise at least one modification which confers increased or enhanced stability to the nucleic acid, including, for example, improved resistance to nuclease digestion in vivo. As used herein, the terms “modification” and “modified” as such terms relate to the nucleic acids provided herein, include at least one alteration which preferably enhances stability and renders the mRNA more stable (e.g., resistant to nuclease digestion) than the wild-type or naturally occurring version of the mRNA. As used herein, the terms “stable” and “stability” as such terms relate to the nucleic acids of the present invention, and particularly with respect to the mRNA, refer to increased or enhanced resistance to degradation by, for example nucleases (i.e., endonucleases or exonucleases) which are normally capable of degrading such mRNA. Increased stability can include, for example, less sensitivity to hydrolysis or other destruction by endogenous enzymes (e.g., endonucleases or exonucleases) or conditions within the target cell or tissue, thereby increasing or enhancing the residence of such mRNA in the target cell, tissue, subject and/or cytoplasm. The stabilized mRNA molecules provided herein demonstrate longer half-lives relative to their naturally occurring, unmodified counterparts (e.g. the wild-type version of the mRNA). Also contemplated by the terms “modification” and “modified” as such terms related to the mRNA of the present invention are alterations which improve or enhance translation of mRNA nucleic acids, including for example, the inclusion of sequences which function in the initiation of protein translation (e.g., the Kozak consensus sequence). (Kozak, M., Nucleic Acids Res 15 (20): 8125-48 (1987)).

[0923] In some embodiments, the mRNAs used in the compositions of the disclosure have undergone a chemical or biological modification to render them more stable. Exemplary modifications to an mRNA include the depletion of a base (e.g., by deletion or by the substitution of one nucleotide for another) or modification of a base, for example, the chemical modification of a base. The phrase “chemical modifications” as used herein, includes modifications which introduce chemistries which differ from those seen in naturally occurring mRNA, for example, covalent modifications such as the introduction of modified nucleotides, (e.g., nucleotide analogs, or the inclusion of pendant groups which are not naturally found in such mRNA molecules).

[0924] Other suitable polynucleotide modifications that may be incorporated into the PE-encoding mRNA used in the compositions of the disclosure include, but are not limited to, 4′-thio-modified bases: 4′-thio-adenosine, 4′-thio-guanosine, 4′-thio-cytidine, 4′-thio-uridine, 4′-thio-5-methyl-cytidine, 4′-thio-pseudouridine, and 4′-thio-2-thiouridine, pyridin-4-one ribonucleoside, 5-aza-uridine, 2-thio-5-aza-uridine, 2-thiouridine, 4-thio-pseudouridine, 2-thio-pseudouridine, 5-hydroxyuridine, 3-methyluridine, 5-carboxymethyl-uridine, 1-carboxymethyl-pseudouridine, 5-propynyl-uridine, 1-propynyl-pseudouridine, 5-taurinomethyluridine, 1-taurinomethyl-pseudouridine, 5-taurinomethyl-2-thio-uridine, 1-taurinomethyl-4-thio-uridine, 5-methyl-uridine, 1-methyl-pseudouridine, 4-thio-1-methyl-pseudouridine, 2-thio-1-methyl-pseudouridine, 1-methyl-1-deaza-pseudouridine, 2-thio-1-methyl-1-deaza-pseudouridine, dihydrouridine, dihydropseudouridine, 2-thio-dihydrouridine, 2-thio-dihydropseudouridine, 2-methoxyuridine, 2-methoxy-4-thio-uridine, 4-methoxy-pseudouridine, 4-methoxy-2-thio-pseudouridine, 5-aza-cytidine, pseudoisocytidine, 3-methyl-cytidine, N4-acetylcytidine, 5-formylcytidine, N4-methylcytidine, 5-hydroxymethylcytidine, 1-methyl-pseudoisocytidine, pyrrolo-cytidine, pyrrolo-pseudoisocytidine, 2-thio-cytidine, 2-thio-5-methyl-cytidine, 4-thio-pseudoisocytidine, 4-thio-1-methyl-pseudoisocytidine, 4-thio-1-methyl-1-deaza-pseudoisocytidine, 1-methyl-1-deaza-pseudoisocytidine, zebularine, 5-aza-zebularine, 5-methyl-zebularine, 5-aza-2-thio-zebularine, 2-thio-zebularine, 2-methoxy-cytidine, 2-methoxy-5-methyl-cytidine, 4-methoxy-pseudoisocytidine, 4-methoxy-1-methyl-pseudoisocytidine, 2-aminopurine, 2,6-diaminopurine, 7-deaza-adenine, 7-deaza-8-aza-adenine, 7-deaza-2-aminopurine, 7-deaza-8-aza-2-aminopurine, 7-deaza-2,6-diaminopurine, 7-deaza-8-aza-2,6-diaminopurine, 1-methyladenosine, N6-methyladenosine, N6-isopentenyladenosine, N6-(cis-hydroxyisopentenyl)adenosine, 2-methylthio-N6-(cis-hydroxyisopentenyl)adenosine, N6-glycinylcarbamoyladenosine, N6-threonylcarbamoyladenosine, 2-methylthio-N6-threonyl carbamoyladenosine, N6,N6-dimethyladenosine, 7-methyladenine, 2-methylthio-adenine, and 2-methoxy-adenine, inosine, 1-methyl-inosine, wyosine, wybutosine, 7-deaza-guanosine, 7-deaza-8-aza-guanosine, 6-thio-guanosine, 6-thio-7-deaza-guanosine, 6-thio-7-deaza-8-aza-guanosine, 7-methyl-guanosine, 6-thio-7-methyl-guanosine, 7-methylinosine, 6-methoxy-guanosine, 1-methylguanosine, N2-methylguanosine, N2,N2-dimethylguanosine, 8-oxo-guanosine, 7-methyl-8-oxo-guanosine, 1-methyl-6-thio-guanosine, N2-methyl-6-thio-guanosine, and N2,N2-dimethyl-6-thio-guanosine, and combinations thereof. The term modification also includes, for example, the incorporation of non-nucleotide linkages or modified nucleotides into the mRNA sequences of the present invention (e.g., modifications to one or both of the 3′ and 5′ ends of an mRNA molecule encoding a functional protein or enzyme). Such modifications include the addition of bases to an mRNA sequence (e.g., the inclusion of a poly A tail or a longer poly A tail), the alteration of the 3′ UTR or the 5′ UTR, complexing the mRNA with an agent (e.g., a protein or a complementary nucleic acid molecule), and inclusion of elements which change the structure of an mRNA molecule (e.g., which form secondary structures).

[0925] In some embodiments, PE-encoding mRNAs include a 5′ cap structure. A 5′ cap is typically added as follows: first, an RNA terminal phosphatase removes one of the terminal phosphate groups from the 5′ nucleotide, leaving two terminal phosphates; guanosine triphosphate (GTP) is then added to the terminal phosphates via a guanylyl transferase, producing a 5′5′5 triphosphate linkage; and the 7-nitrogen of guanine is then methylated by a methyltransferase. Examples of cap structures include, but are not limited to, m7G(5′)ppp (5′(A,G(5′)ppp(5′)A and G(5′)ppp(5′)G. Naturally occurring cap structures comprise a 7-methyl guanosine that is linked via a triphosphate bridge to the 5′-end of the first transcribed nucleotide, resulting in a dinucleotide cap of m7G(5′)ppp(5′)N, where N is any nucleoside. In vivo, the cap is added enzymatically. The cap is added in the nucleus and is catalyzed by the enzyme guanylyl transferase. The addition of the cap to the 5′ terminal end of RNA occurs immediately after initiation of transcription. The terminal nucleoside is typically a guanosine, and is in the reverse orientation to all the other nucleotides, i.e., G(5′)ppp(5′)GpNpNp.

[0926] Additional cap analogs include, but are not limited to, a chemical structures selected from the group consisting of m7GpppG, m7GpppA, m7GpppC; unmethylated cap analogs (e.g., GpppG); dimethylated cap analog (e.g., m2,7GpppG), trimethylated cap analog (e.g., m2,2,7GpppG), dimethylated symmetrical cap analogs (e.g., m7Gpppm7G), or anti reverse cap analogs (e.g., ARCA; m7,2′OmeGpppG, m72′dGpppG, m7,3′OmeGpppG, m7,3′dGpppG and their tetraphosphate derivatives) (see, e.g., Jemielity, J. et al., “Novel ‘anti-reverse’ cap analogs with superior translational properties”, RNA, 9: 1108-1122 (2003)).

[0927] Typically, the presence of a “tail” serves to protect the mRNA from exonuclease degradation. A poly A or poly U tail is thought to stabilize natural messengers and synthetic sense RNA. Therefore, in certain embodiments a long poly A or poly U tail can be added to an mRNA molecule thus rendering the RNA more stable. Poly A or poly U tails can be added using a variety of art-recognized techniques. For example, long poly A tails can be added to synthetic or in vitro transcribed RNA using poly A polymerase (Yokoe, et al. Nature Biotechnology. 1996; 14: 1252-1256). A transcription vector can also encode long poly A tails. In addition, poly A tails can be added by transcription directly from PCR products. Poly A may also be ligated to the 3′ end of a sense RNA with RNA ligase (see, e.g., Molecular Cloning A Laboratory Manual, 2nd Ed., ed. by Sambrook, Fritsch and Maniatis (Cold Spring Harbor Laboratory Press: 1991 edition)).

[0928] Typically, the length of a poly A or poly U tail can be at least about 10, 50, 100, 200, 300, 400 at least 500 nucleotides. In some embodiments, a poly-A tail on the 3′ terminus of mRNA typically includes about 10 to 300 adenosine nucleotides (e.g., about 10 to 200 adenosine nucleotides, about 10 to 150 adenosine nucleotides, about 10 to 100 adenosine nucleotides, about 20 to 70 adenosine nucleotides, or about 20 to 60 adenosine nucleotides). In some embodiments, mRNAs include a 3′ poly(C) tail structure. A suitable poly-C tail on the 3′ terminus of mRNA typically include about 10 to 200 cytosine nucleotides (e.g., about 10 to 150 cytosine nucleotides, about 10 to 100 cytosine nucleotides, about 20 to 70 cytosine nucleotides, about 20 to 60 cytosine nucleotides, or about 10 to 40 cytosine nucleotides). The poly-C tail may be added to the poly-A or poly U tail or may substitute the poly-A or poly U tail.

[0929] PE-encoding mRNAs according to the present disclosure may be synthesized according to any of a variety of known methods. For example, mRNAs according to the present invention may be synthesized via in vitro transcription (IVT). Briefly, IVT is typically performed with a linear or circular DNA template containing a promoter, a pool of ribonucleotide triphosphates, a buffer system that may include DTT and magnesium ions, and an appropriate RNA polymerase (e.g., T3, T7 or SP6 RNA polymerase), DNAse I, pyrophosphatase, and/or RNAse inhibitor. The exact conditions will vary according to the specific application.

[0930] In embodiments involving mRNA delivery, the ratio of the mRNA encoding the Prime editor to the pegRNA may be important for efficient editing. In certain embodiments, the weight ratio of mRNA (encoding the Prime editor) to pegRNA is 1:1. In certain other embodiments, the weight ratio of mRNA (encoding the Prime editor) to pegRNA is 2:1. In still other embodiments, the weight ratio of mRNA (encoding the Prime editor) to pegRNA is 1:2. In still further embodiments, the weight ratio of mRNA (encoding the Prime editor) to pegRNA is selected from the group consisting of about 1:1000, 1:900; 1:800; 1:700; 1:600; 1:500; 1:400; 1:300; 1:200; 1:100; 1:90; 1:80; 1:70; 1:60; 1:50; 1:40; 1:30; 1:20; 1:10; and 1:1. In other embodiments, the weight ratio of mRNA (encoding the Prime editor) to pegRNA is selected from the group consisting of about 1:1000, 1:900; 800:1; 700:1; 600:1; 500:1; 400:1; 300:1; 200:1; 100:1; 90:1; 80:1; 70:1; 60:1; 50:1; 40:1; 30:1; 20:1; 10:1; and 1:1.

### [9] Methods of Treatment

[0931] The instant disclosure provides methods for the treatment of a subject diagnosed with a disease associated with or caused by a point mutation, or other mutations (e.g., deletion, insertion, inversion, duplication, etc.) that can be corrected by the prime editing system provided herein, as exemplified, but not limited to prion disease, trinucleotide repeat expansion disease, or CDKL5 Deficiency Disorder (CDD) (e.g., Example 6 herein).

[0932] Virtually any disease-causing genetic defect may be repaired by using prime editing, which includes the selection of an appropriate prime editor (including a napDNAbp and a polymerase (e.g., a reverse transcriptase), and designing of an appropriate pegRNA designed to (a) target the appropriate target DNA containing an edit site, and (b) provide a template for the synthesis of a single strand of DNA from the 3′ end of the nick site that includes the desired edit which displaces and replaces the endogenous strand immediately downstream of the nick site. Prime editing can be used, without limitation, to (a) install mutation-correcting changes to a nucleotide sequence, (b) install protein and RNA tags, (c) install immunoepitopes on proteins of interest, (d) install inducible dimerization domains in proteins, (e) install or remove sequences to alter that activity of a biomolecule, (f) install recombinase target sites to direct specific genetic changes, and (g) mutagenesis of a target sequence by using an error-prone RT.

[0933] The method of treating a disorder can involve as an early step the design of an appropriate pegRNA and prime editor in accordance with the methods described herein, which include a number of considerations that may be taken into account, such as:
[0934] (a) the target sequence, i.e., the nucleotide sequence in which one or more nucleobase modifications are desired to be installed by the prime editor;
[0935] (b) the location of the cut site within the target sequence, i.e., the specific nucleobase position at which the prime editor will induce a single-stand nick to create a 3′ end RT primer sequence on one side of the nick and the 5′ end endogenous flap on the other side of the nick (which ultimately is removed by FEN1 or equivalent thereto and replaced by the 3′ ssDNA flap. The cut site creates the 3′ end primer sequence which becomes extended by the polymerase of the Prime editor (e.g., a RT enzyme) during RNA-dependent DNA polymerization to create the 3′ ssDNA flap containing the desired edit, which then replaces the 5′ endogenous DNA flap in the target sequence.
[0936] (c) the available PAM sequences (including the canonical SpCas9 PAM sites, as well as non-canonical PAM sites recognized by Cas9 variants and equivalents with expanded or differing PAM specificities);
[0937] (d) the spacing between the available PAM sequences and the location of the cut site in the PAM strand;
[0938] (e) the particular Cas9, Cas9 variant, or Cas9 equivalent of the prime editor available to be used (which in part is dictated by the available PAM);
[0939] (f) the sequence and length of the primer binding site;
[0940] (g) the sequence and length of the edit template;
[0941] (h) the sequence and length of the homology arm;
[0942] (i) the spacer sequence and length; and
[0943] (j) the gRNA core sequence.

[0944] A suitable pegRNA, and optionally a nicking-sgRNA design guide for second-site nicking, can be designed by way of the following exemplary step-by-step set of instructions which takes into account one or more of the above considerations. The steps reference the examples shown in FIGS. 70A-70I.
[0945] 1. Define the target sequence and the edit. Retrieve the sequence of the target DNA region (˜200 bp) centered around the location of the desired edit (point mutation, insertion, deletion, or combination thereof). See FIG. 70A.
[0946] 2. Locate target PAMs. Identify PAMs in the proximity to the desired edit location. PAMs can be identified on either strand of DNA proximal to the desired edit location. While PAMs close to the edit position are preferred (i.e., wherein the nick site is less than 30 nt from the edit position, or less than 29 nt, 28 nt, 27 nt, 26 nt, 25 nt, 24 nt, 23 nt, 22 nt, 21 nt, 20 nt, 19 nt, 18 nt, 17 nt, 16 nt, 15 nt, 14 nt, 13 nt, 12 nt, 11 nt, 10 nt, 9 nt, 8 nt, 7 nt, 6 nt, 5 nt, 4 nt, 3 nt, or 2 nt from the edit position to the nick site), it is possible to install edits using protospacers and PAMs that place the nick ≥30 nt from the edit position. See FIG. 70B.
[0947] 3. Locate the nick sites. For each PAM being considered, identify the corresponding nick site and on which strand. For Sp Cas9 H840A nickase, cleavage occurs in the PAM-containing strand between the 3^{rd} and 4^{th} bases 5′ to the NGG PAM. All edited nucleotides must exist 3′ of the nick site, so appropriate PAMs must place the nick 5′ to the target edit on the PAM-containing strand. In the example shown below, there are two possible PAMs. For simplicity, the remaining steps will demonstrate the design of a pegRNA using PAM 1 only. See FIG. 70C.
[0948] 4. Design the spacer sequence. The protospacer of SpCas9 corresponds to the 20 nucleotides 5′ to the NGG PAM on the PAM-containing strand. Efficient Pol III transcription initiation requires a G to be the first transcribed nucleotide. If the first nucleotide of the protospacer is a G, the spacer sequence for the pegRNA is simply the protospacer sequence. If the first nucleotide of the protospacer is not a G, the spacer sequence of the pegRNA is G followed by the protospacer sequence. See FIG. 70D.
[0949] 5. Design a primer binding site (PBS). Using the starting allele sequence, identify the DNA primer on the PAM-containing strand. The 3′ end of the DNA primer is the nucleotide just upstream of the nick site (i.e. the 4^{th} base 5′ to the NGG PAM for Sp Cas9). As a general design principle for use with PE2 and PE3, a pegRNA primer binding site (PBS) containing 12 to 13 nucleotides of complementarity to the DNA primer can be used for sequences that contain ˜40-60% GC content. For sequences with low GC content, longer (14- to 15-nt) PBSs should be tested. For sequences with higher GC content, shorter (8- to 11-nt) PBSs should be tested. Optimal PBS sequences should be determined empirically, regardless of GC content. To design a length-p PBS sequence, take the reverse complement of the first p nucleotides 5′ of the nick site in the PAM-containing strand using the starting allele sequence. See FIG. 70E.
[0950] 6. Design an RT template (or DNA synthesis template). The RT template (or DNA synthesis template where the polymerase is not reverse transcriptase) encodes the designed edit and homology to the sequence adjacent to the edit. In one embodiment, these regions correspond to the DNA synthesis template of FIG. 3D and FIG. 3E, wherein the DNA synthesis template comprises the “edit template” and the “homology arm.” Optimal RT template lengths vary based on the target site. For short-range edits (positions +1 to +6), it is recommended to test a short (9 to 12 nt), a medium (13 to 16 nt), and a long (17 to 20 nt) RT template. For long-range edits (positions +7 and beyond), it is recommended to use RT templates that extend at least 5 nt (preferably 10 or more nt) past the position of the edit to allow for sufficient 3′ DNA flap homology. For long-range edits, several RT templates should be screened to identify functional designs. For larger insertions and deletions (≥5 nt), incorporation of greater 3′ homology (˜20 nt or more) into the RT template is recommended. Editing efficiency is typically impaired when the RT template encodes the synthesis of a G as the last nucleotide in the reverse transcribed DNA product (corresponding to a C in the RT template of the pegRNA). As many RT templates support efficient prime editing, avoidance of G as the final synthesized nucleotide is recommended when designing RT templates. To design a length-r RT template sequence, use the desired allele sequence and take the reverse complement of the first r nucleotides 3′ of the nick site in the strand that originally contained the PAM. Note that compared to SNP edits, insertion or deletion edits using RT templates of the same length will not contain identical homology. See FIG. 70F.
[0951] 7. Assemble the full pegRNA sequence. Concatenate the pegRNA components in the following order (5′ to 3′): spacer, scaffold, RT template and PBS. See FIG. 70G.
[0952] 8. Designing nicking-sgRNAs for PE3. Identify PAMs on the non-edited strand upstream and downstream of the edit. Optimal nicking positions are highly locus-dependent and should be determined empirically. In general, nicks placed 40 to 90 nucleotides 5′ to the position across from the pegRNA-induced nick lead to higher editing yields and fewer indels. A nicking sgRNA has a spacer sequence that matches the 20-nt protospacer in the starting allele, with the addition of a 5′-G if the protospacer does not begin with a G. See FIG. 70H.
[0953] 9. Designing PE3b nicking-sgRNAs. If a PAM exists in the complementary strand and its corresponding protospacer overlaps with the sequence targeted for editing, this edit could be a candidate for the PE3b system. In the PE3b system, the spacer sequence of the nicking-sgRNA matches the sequence of the desired edited allele, but not the starting allele. The PE3b system operates efficiently when the edited nucleotide(s) falls within the seed region (˜10 nt adjacent to the PAM) of the nicking-sgRNA protospacer. This prevents nicking of the complementary strand until after installation of the edited strand, preventing competition between the pegRNA and the sgRNA for binding the target DNA. PE3b also avoids the generation of simultaneous nicks on both strands, thus reducing indel formation significantly while maintaining high editing efficiency. PE3b sgRNAs should have a spacer sequence that matches the 20-nt protospacer in the desired allele, with the addition of a 5′ G if needed. See FIG. 70I.

[0954] The above step-by-step process for designing a suitable pegRNA and a second-site nicking sgRNA is not meant to be limiting in any way. The disclosure contemplates variations of the above-described step-by-step process which would be derivable therefrom by a person of ordinary skill in the art.

[0955] Once a suitable pegRNA and Prime editor are selected/designed, they may be administered by a suitable methodology, such as by vector-based transfection (in which one or more vectors comprising DNA encoding the pegRNA and the Prime editor and which are expressed within a cell upon transfection with the vectors), direct delivery of the Prime editor complexed with the pegRNA (e.g., RNP delivery) in a delivery format (e.g., lipid particles, nanoparticles), or by a mRNA-based delivery system. Such methods are described herein in the present disclosure and any know method may be utilized.

[0956] The pegRNA and Prime editor (or together, referred to as the PE complex) can be delivered to a cell in a therapeutically effective amount such that upon contacting the target DNA of interest, the desired edit becomes installed therein.

[0957] Any disease is conceivably treatable by such methods so long as delivery to the appropriate cells is feasible. The person having ordinary skill in the art will be able to choose and/or select a PE delivery methodology to suit the intended purpose and the intended target cells.

[0958] For example, in some embodiments, a method is provided that comprises administering to a subject having such a disease, e.g., a cancer associated with a point mutation as described above, an effective amount of the prime editing system described herein that corrects the point mutation or introduces a deactivating mutation into a disease-associated gene as mediated by homology-directed repair in the presence of a donor DNA molecule comprising desired genetic change. In some embodiments, a method is provided that comprises administering to a subject having such a disease, e.g., a cancer associated with a point mutation as described above, an effective amount of the prime editing system described herein that corrects the point mutation or introduces a deactivating mutation into a disease-associated gene. In some embodiments, the disease is a proliferative disease. In some embodiments, the disease is a genetic disease. In some embodiments, the disease is a neoplastic disease. In some embodiments, the disease is a metabolic disease. In some embodiments, the disease is a lysosomal storage disease. Other diseases that can be treated by correcting a point mutation or introducing a deactivating mutation into a disease-associated gene will be known to those of skill in the art, and the disclosure is not limited in this respect.

[0959] In another aspect, a method is provided that uses a prime editor (e.g., PE1, PE2, or PE3) in combination with a guide RNAs (pegRNAs) to carry out prime editing to directly install or correct mutations in the CDKL5 gene which cause CDKL5 deficiency disorder. In various embodiments, the disclosure provides a complex comprising a prime editor (e.g., PE1, PE2, or PE3) and a pegRNA that is capable of directly installing or correcting more than one mutation in the CDKL5 gene in multiple subjects.

[0960] The instant disclosure provides methods for the treatment of additional diseases or disorders, e.g., diseases or disorders that are associated or caused by a point mutation that can be corrected by prime editing. Some such diseases are described herein, and additional suitable diseases that can be treated with the strategies and fusion proteins provided herein will be apparent to those of skill in the art based on the instant disclosure. Exemplary suitable diseases and disorders are listed below. It will be understood that the numbering of the specific positions or residues in the respective sequences depends on the particular protein and numbering scheme used. Numbering might be different, e.g., in precursors of a mature protein and the mature protein itself, and differences in sequences from species to species may affect numbering. One of skill in the art will be able to identify the respective residue in any homologous protein and in the respective encoding nucleic acid by methods well known in the art, e.g., by sequence alignment and determination of homologous residues. Exemplary suitable diseases and disorders include, without limitation: 2-methyl-3-hydroxybutyric aciduria; 3 beta-Hydroxysteroid dehydrogenase deficiency; 3-Methylglutaconic aciduria; 3-Oxo-5 alpha-steroid delta 4-dehydrogenase deficiency; 46,XY sex reversal, type 1, 3, and 5; 5-Oxoprolinase deficiency; 6-pyruvoyl-tetrahydropterin synthase deficiency; Aarskog syndrome; Aase syndrome; Achondrogenesis type 2; Achromatopsia 2 and 7; Acquired long QT syndrome; Acrocallosal syndrome, Schinzel type; Acrocapitofemoral dysplasia; Acrodysostosis 2, with or without hormone resistance; Acroerythrokeratoderma; Acromicric dysplasia; Acth-independent macronodular adrenal hyperplasia 2; Activated PI3K-delta syndrome; Acute intermittent porphyria; deficiency of Acyl-CoA dehydrogenase family, member 9; Adams-Oliver syndrome 5 and 6; Adenine phosphoribosyltransferase deficiency; Adenylate kinase deficiency; hemolytic anemia due to Adenylosuccinate lyase deficiency; Adolescent nephronophthisis; Renal-hepatic-pancreatic dysplasia; Meckel syndrome type 7; Adrenoleukodystrophy; Adult junctional epidermolysis bullosa; Epidermolysis bullosa, junctional, localisata variant; Adult neuronal ceroid lipofuscinosis; Adult neuronal ceroid lipofuscinosis; Adult onset ataxia with oculomotor apraxia; ADULT syndrome; Afibrinogenemia and congenital Afibrinogenemia; autosomal recessive Agammaglobulinemia 2; Age-related macular degeneration 3, 6, 11, and 12; Aicardi Goutieres syndromes 1, 4, and 5; Chilbain lupus 1; Alagille syndromes 1 and 2; Alexander disease; Alkaptonuria; Allan-Herndon-Dudley syndrome; Alopecia universalis congenital; Alpers encephalopathy; Alpha-1-antitrypsin deficiency; autosomal dominant, autosomal recessive, and X-linked recessive Alport syndromes; Alzheimer disease, familial, 3, with spastic paraparesis and apraxia; Alzheimer disease, types, 1, 3, and 4; hypocalcification type and hypomaturation type, IIA1 Amelogenesis imperfecta; Aminoacylase 1 deficiency; Amish infantile epilepsy syndrome; Amyloidogenic transthyretin amyloidosis; Amyloid Cardiomyopathy, Transthyretin-related; Cardiomyopathy; Amyotrophic lateral sclerosis types 1, 6, 15 (with or without frontotemporal dementia), 22 (with or without frontotemporal dementia), and 10; Frontotemporal dementia with TDP43 inclusions, TARDBP-related; Andermann syndrome; Andersen Tawil syndrome; Congenital long QT syndrome; Anemia, nonspherocytic hemolytic, due to G6PD deficiency; Angelman syndrome; Severe neonatal-onset encephalopathy with microcephaly; susceptibility to Autism, X-linked 3; Angiopathy, hereditary, with nephropathy, aneurysms, and muscle cramps; Angiotensin i-converting enzyme, benign serum increase; Aniridia, cerebellar ataxia, and mental retardation; Anonychia; Antithrombin III deficiency; Antley-Bixler syndrome with genital anomalies and disordered steroidogenesis; Aortic aneurysm, familial thoracic 4, 6, and 9; Thoracic aortic aneurysms and aortic dissections; Multisystemic smooth muscle dysfunction syndrome; Moyamoya disease 5; Aplastic anemia; Apparent mineralocorticoid excess; Arginase deficiency; Argininosuccinate lyase deficiency; Aromatase deficiency; Arrhythmogenic right ventricular cardiomyopathy types 5, 8, and 10; Primary familial hypertrophic cardiomyopathy; Arthrogryposis multiplex congenita, distal, X-linked; Arthrogryposis renal dysfunction cholestasis syndrome; Arthrogryposis, renal dysfunction, and cholestasis 2; Asparagine synthetase deficiency; Abnormality of neuronal migration; Ataxia with vitamin E deficiency; Ataxia, sensory, autosomal dominant; Ataxia-telangiectasia syndrome; Hereditary cancer-predisposing syndrome; Atransferrinemia; Atrial fibrillation, familial, 11, 12, 13, and 16; Atrial septal defects 2, 4, and 7 (with or without atrioventricular conduction defects); Atrial standstill 2; Atrioventricular septal defect 4; Atrophia bulborum hereditaria; ATR-X syndrome; Auriculocondylar syndrome 2; Autoimmune disease, multisystem, infantile-onset; Autoimmune lymphoproliferative syndrome, type 1a; Autosomal dominant hypohidrotic ectodermal dysplasia; Autosomal dominant progressive external ophthalmoplegia with mitochondrial DNA deletions 1 and 3; Autosomal dominant torsion dystonia 4; Autosomal recessive centronuclear myopathy; Autosomal recessive congenital ichthyosis 1, 2, 3, 4A, and 4B; Autosomal recessive cutis laxa type IA and 1B; Autosomal recessive hypohidrotic ectodermal dysplasia syndrome; Ectodermal dysplasia 11b; hypohidrotic/hair/tooth type, autosomal recessive; Autosomal recessive hypophosphatemic bone disease; Axenfeld-Rieger syndrome type 3; Bainbridge-Ropers syndrome; Bannayan-Riley-Ruvalcaba syndrome; PTEN hamartoma tumor syndrome; Baraitser-Winter syndromes 1 and 2; Barakat syndrome; Bardet-Biedl syndromes 1, 11, 16, and 19; Bare lymphocyte syndrome type 2, complementation group E; Bartter syndrome antenatal type 2; Bartter syndrome types 3, 3 with hypocalciuria, and 4; Basal ganglia calcification, idiopathic, 4; Beaded hair; Benign familial hematuria; Benign familial neonatal seizures 1 and 2; Seizures, benign familial neonatal, 1, and/or myokymia; Seizures, Early infantile epileptic encephalopathy 7; Benign familial neonatal-infantile seizures; Benign hereditary chorea; Benign scapuloperoneal muscular dystrophy with cardiomyopathy; Bernard-Soulier syndrome, types A1 and A2 (autosomal dominant); Bestrophinopathy, autosomal recessive; beta Thalassemia; Bethlem myopathy and Bethlem myopathy 2; Bietti crystalline corneoretinal dystrophy; Bile acid synthesis defect, congenital, 2; Biotinidase deficiency; Birk Barel mental retardation dysmorphism syndrome; Blepharophimosis, ptosis, and epicanthus inversus; Bloom syndrome; Borjeson-Forssman-Lehmann syndrome; Boucher Neuhauser syndrome; Brachydactyly types A1 and A2; Brachydactyly with hypertension; Brain small vessel disease with hemorrhage; Branched-chain ketoacid dehydrogenase kinase deficiency; Branchiootic syndromes 2 and 3; Breast cancer, early-onset; Breast-ovarian cancer, familial 1, 2, and 4; Brittle cornea syndrome 2; Brody myopathy; Bronchiectasis with or without elevated sweat chloride 3; Brown-Vialetto-Van laere syndrome and Brown-Vialetto-Van Laere syndrome 2; Brugada syndrome; Brugada syndrome 1; Ventricular fibrillation; Paroxysmal familial ventricular fibrillation; Brugada syndrome and Brugada syndrome 4; Long QT syndrome; Sudden cardiac death; Bull eye macular dystrophy; Stargardt disease 4; Cone-rod dystrophy 12; Bullous ichthyosiform erythroderma; Burn-Mckeown syndrome; Candidiasis, familial, 2, 5, 6, and 8; Carbohydrate-deficient glycoprotein syndrome type I and II; Carbonic anhydrase VA deficiency, hyperammonemia due to; Carcinoma of colon; Cardiac arrhythmia; Long QT syndrome, LQT1 subtype; Cardioencephalomyopathy, fatal infantile, due to cytochrome c oxidase deficiency; Cardiofaciocutaneous syndrome; Cardiomyopathy; Danon disease; Hypertrophic cardiomyopathy; Left ventricular noncompaction cardiomyopathy; Carnevale syndrome; Carney complex, type 1; Carnitine acylcarnitine translocase deficiency; Carnitine palmitoyltransferase I, II, II (late onset), and II (infantile) deficiency; Cataract 1, 4, autosomal dominant, autosomal dominant, multiple types, with microcornea, coppock-like, juvenile, with microcornea and glucosuria, and nuclear diffuse nonprogressive; Catecholaminergic polymorphic ventricular tachycardia; Caudal regression syndrome; Cd8 deficiency, familial; Central core disease; Centromeric instability of chromosomes 1, 9 and 16 and immunodeficiency; Cerebellar ataxia infantile with progressive external ophthalmoplegi and Cerebellar ataxia, mental retardation, and dysequilibrium syndrome 2; Cerebral amyloid angiopathy, APP-related; Cerebral autosomal dominant and recessive arteriopathy with subcortical infarcts and leukoencephalopathy; Cerebral cavernous malformations 2; Cerebrooculofacioskeletal syndrome 2; Cerebro-oculo-facio-skeletal syndrome; Cerebroretinal microangiopathy with calcifications and cysts; Ceroid lipofuscinosis neuronal 2, 6, 7, and 10; Ch\xc3\xa9diak-Higashi syndrome, Chediak-Higashi syndrome, adult type; Charcot-Marie-Tooth disease types 1B, 2B2, 2C, 2F, 2I, 2U (axonal), 1C (demyelinating), dominant intermediate C, recessive intermediate A, 2A2, 4C, 4D, 4H, IF, IVF, and X; Scapuloperoneal spinal muscular atrophy; Distal spinal muscular atrophy, congenital nonprogressive; Spinal muscular atrophy, distal, autosomal recessive, 5; CHARGE association; Childhood hypophosphatasia; Adult hypophosphatasia; Cholecystitis; Progressive familial intrahepatic cholestasis 3; Cholestasis, intrahepatic, of pregnancy 3; Cholestanol storage disease; Cholesterol monooxygenase (side-chain cleaving) deficiency; Chondrodysplasia Blomstrand type; Chondrodysplasia punctata 1, X-linked recessive and 2 X-linked dominant; CHOPS syndrome; Chronic granulomatous disease, autosomal recessive cytochrome b-positive, types 1 and 2; Chudley-McCullough syndrome; Ciliary dyskinesia, primary, 7, 11, 15, 20 and 22; Citrullinemia type I; Citrullinemia type I and II; Cleidocranial dysostosis; C-like syndrome; Cockayne syndrome type A; Coenzyme Q10 deficiency, primary 1, 4, and 7; Coffin Siris/Intellectual Disability; Coffin-Lowry syndrome; Cohen syndrome; Cold-induced sweating syndrome 1; COLE-CARPENTER SYNDROME 2; Combined cellular and humoral immune defects with granulomas; Combined d-2- and 1-2-hydroxyglutaric aciduria; Combined malonic and methylmalonic aciduria; Combined oxidative phosphorylation deficiencies 1, 3, 4, 12, 15, and 25; Combined partial and complete 17-alpha-hydroxylase/17,20-lyase deficiency; Common variable immunodeficiency 9; Complement component 4, partial deficiency of, due to dysfunctional cl inhibitor; Complement factor B deficiency; Cone monochromatism; Cone-rod dystrophy 2 and 6; Cone-rod dystrophy amelogenesis imperfecta; Congenital adrenal hyperplasia and Congenital adrenal hypoplasia, X-linked; Congenital amegakaryocytic thrombocytopenia; Congenital aniridia; Congenital central hypoventilation; Hirschsprung disease 3; Congenital contractural arachnodactyly; Congenital contractures of the limbs and face, hypotonia, and developmental delay; Congenital disorder of glycosylation types 1B, 1D, 1G, 1H, 1J, 1K, 1N, 1P, 2C, 2J, 2K, IIm; Congenital dyserythropoietic anemia, type I and II; Congenital ectodermal dysplasia of face; Congenital erythropoietic porphyria; Congenital generalized lipodystrophy type 2; Congenital heart disease, multiple types, 2; Congenital heart disease; Interrupted aortic arch; Congenital lipomatous overgrowth, vascular malformations, and epidermal nevi; Non-small cell lung cancer; Neoplasm of ovary; Cardiac conduction defect, nonspecific; Congenital microvillous atrophy; Congenital muscular dystrophy; Congenital muscular dystrophy due to partial LAMA2 deficiency; Congenital muscular dystrophy-dystroglycanopathy with brain and eye anomalies, types A2, A7, A8, A11, and A14; Congenital muscular dystrophy-dystroglycanopathy with mental retardation, types B2, B3, B5, and B15; Congenital muscular dystrophy-dystroglycanopathy without mental retardation, type B5; Congenital muscular hypertrophy-cerebral syndrome; Congenital myasthenic syndrome, acetazolamide-responsive; Congenital myopathy with fiber type disproportion; Congenital ocular coloboma; Congenital stationary night blindness, type 1A, 1B, 1C, 1E, 1F, and 2A; Coproporphyria; Cornea plana 2; Corneal dystrophy, Fuchs endothelial, 4; Corneal endothelial dystrophy type 2; Corneal fragility keratoglobus, blue sclerae and joint hypermobility; Cornelia de Lange syndromes 1 and 5; Coronary artery disease, autosomal dominant 2; Coronary heart disease; Hyperalphalipoproteinemia 2; Cortical dysplasia, complex, with other brain malformations 5 and 6; Cortical malformations, occipital; Corticosteroid-binding globulin deficiency; Corticosterone methyloxidase type 2 deficiency; Costello syndrome; Cowden syndrome 1; Coxa plana; Craniodiaphyseal dysplasia, autosomal dominant; Craniosynostosis 1 and 4; Craniosynostosis and dental anomalies; Creatine deficiency, X-linked; Crouzon syndrome; Cryptophthalmos syndrome; Cryptorchidism, unilateral or bilateral; Cushing symphalangism; Cutaneous malignant melanoma 1; Cutis laxa with osteodystrophy and with severe pulmonary, gastrointestinal, and urinary abnormalities; Cyanosis, transient neonatal and atypical nephropathic; Cystic fibrosis; Cystinuria; Cytochrome c oxidase i deficiency; Cytochrome-c oxidase deficiency; D-2-hydroxyglutaric aciduria 2; Darier disease, segmental; Deafness with labyrinthine aplasia microtia and microdontia (LAMM); Deafness, autosomal dominant 3a, 4, 12, 13, 15, autosomal dominant nonsyndromic sensorineural 17, 20, and 65; Deafness, autosomal recessive 1A, 2, 3, 6, 8, 9, 12, 15, 16, 18b, 22, 28, 31, 44, 49, 63, 77, 86, and 89; Deafness, cochlear, with myopia and intellectual impairment, without vestibular involvement, autosomal dominant, X-linked 2; Deficiency of 2-methylbutyryl-CoA dehydrogenase; Deficiency of 3-hydroxyacyl-CoA dehydrogenase; Deficiency of alpha-mannosidase; Deficiency of aromatic-L-amino-acid decarboxylase; Deficiency of bisphosphoglycerate mutase; Deficiency of butyryl-CoA dehydrogenase; Deficiency of ferroxidase; Deficiency of galactokinase; Deficiency of guanidinoacetate methyltransferase; Deficiency of hyaluronoglucosaminidase; Deficiency of ribose-5-phosphate isomerase; Deficiency of steroid 11-beta-monooxygenase; Deficiency of UDPglucose-hexose-1-phosphate uridylyltransferase; Deficiency of xanthine oxidase; Dejerine-Sottas disease; Charcot-Marie-Tooth disease, types ID and IVF; Dejerine-Sottas syndrome, autosomal dominant; Dendritic cell, monocyte, B lymphocyte, and natural killer lymphocyte deficiency; Desbuquois dysplasia 2; Desbuquois syndrome; DFNA 2 Nonsyndromic Hearing Loss; Diabetes mellitus and insipidus with optic atrophy and deafness; Diabetes mellitus, type 2, and insulin-dependent, 20; Diamond-Blackfan anemia 1, 5, 8, and 10; Diarrhea 3 (secretory sodium, congenital, syndromic) and 5 (with tufting enteropathy, congenital); Dicarboxylic aminoaciduria; Diffuse palmoplantar keratoderma, Bothnian type; Digitorenocerebral syndrome; Dihydropteridine reductase deficiency; Dilated cardiomyopathy 1A, 1AA, 1C, 1G, 1BB, 1DD, 1FF, 1HH, 1I, 1KK, 1N, 1S, 1Y, and 3B; Left ventricular noncompaction 3; Disordered steroidogenesis due to cytochrome p450 oxidoreductase deficiency; Distal arthrogryposis type 2B; Distal hereditary motor neuronopathy type 2B; Distal myopathy Markesbery-Griggs type; Distal spinal muscular atrophy, X-linked 3; Distichiasis-lymphedema syndrome; Dominant dystrophic epidermolysis bullosa with absence of skin; Dominant hereditary optic atrophy; Donnai Barrow syndrome; Dopamine beta hydroxylase deficiency; Dopamine receptor d2, reduced brain density of; Dowling-degos disease 4; Doyne honeycomb retinal dystrophy; Malattia leventinese; Duane syndrome type 2; Dubin-Johnson syndrome; Duchenne muscular dystrophy; Becker muscular dystrophy; Dysfibrinogenemia; Dyskeratosis congenita autosomal dominant and autosomal dominant, 3; Dyskeratosis congenita, autosomal recessive, 1, 3, 4, and 5; Dyskeratosis congenita X-linked; Dyskinesia, familial, with facial myokymia; Dysplasminogenemia; Dystonia 2 (torsion, autosomal recessive), 3 (torsion, X-linked), 5 (Dopa-responsive type), 10, 12, 16, 25, 26 (Myoclonic); Seizures, benign familial infantile, 2; Early infantile epileptic encephalopathy 2, 4, 7, 9, 10, 11, 13, and 14; Atypical Rett syndrome; Early T cell progenitor acute lymphoblastic leukemia; Ectodermal dysplasia skin fragility syndrome; Ectodermal dysplasia-syndactyly syndrome 1; Ectopia lentis, isolated autosomal recessive and dominant; Ectrodactyly, ectodermal dysplasia, and cleft lip/palate syndrome 3; Ehlers-Danlos syndrome type 7 (autosomal recessive), classic type, type 2 (progeroid), hydroxylysine-deficient, type 4, type 4 variant, and due to tenascin-X deficiency; Eichsfeld type congenital muscular dystrophy; Endocrine-cerebroosteodysplasia; Enhanced s-cone syndrome; Enlarged vestibular aqueduct syndrome; Enterokinase deficiency; Epidermodysplasia verruciformis; Epidermolysa bullosa simplex and limb girdle muscular dystrophy, simplex with mottled pigmentation, simplex with pyloric atresia, simplex, autosomal recessive, and with pyloric atresia; Epidermolytic palmoplantar keratoderma; Familial febrile seizures 8; Epilepsy, childhood absence 2, 12 (idiopathic generalized, susceptibility to) 5 (nocturnal frontal lobe), nocturnal frontal lobe type 1, partial, with variable foci, progressive myoclonic 3, and X-linked, with variable learning disabilities and behavior disorders; Epileptic encephalopathy, childhood-onset, early infantile, 1, 19, 23, 25, 30, and 32; Epiphyseal dysplasia, multiple, with myopia and conductive deafness; Episodic ataxia type 2; Episodic pain syndrome, familial, 3; Epstein syndrome; Fechtner syndrome; Erythropoietic protoporphyria; Estrogen resistance; Exudative vitreoretinopathy 6; Fabry disease and Fabry disease, cardiac variant; Factor H, VII, X, v and factor viii, combined deficiency of 2, xiii, a subunit, deficiency; Familial adenomatous polyposis 1 and 3; Familial amyloid nephropathy with urticaria and deafness; Familial cold urticarial; Familial aplasia of the vermis; Familial benign pemphigus; Familial cancer of breast; Breast cancer, susceptibility to; Osteosarcoma; Pancreatic cancer 3; Familial cardiomyopathy; Familial cold autoinflammatory syndrome 2; Familial colorectal cancer; Familial exudative vitreoretinopathy, X-linked; Familial hemiplegic migraine types 1 and 2; Familial hypercholesterolemia; Familial hypertrophic cardiomyopathy 1, 2, 3, 4, 7, 10, 23 and 24; Familial hypokalemia-hypomagnesemia; Familial hypoplastic, glomerulocystic kidney; Familial infantile myasthenia; Familial juvenile gout; Familial Mediterranean fever and Familial mediterranean fever, autosomal dominant; Familial porencephaly; Familial porphyria cutanea tarda; Familial pulmonary capillary hemangiomatosis; Familial renal glucosuria; Familial renal hypouricemia; Familial restrictive cardiomyopathy 1; Familial type 1 and 3 hyperlipoproteinemia; Fanconi anemia, complementation group E, I, N, and O; Fanconi-Bickel syndrome; Favism, susceptibility to; Febrile seizures, familial, 11; Feingold syndrome 1; Fetal hemoglobin quantitative trait locus 1; FG syndrome and FG syndrome 4; Fibrosis of extraocular muscles, congenital, 1, 2, 3a (with or without extraocular involvement), 3b; Fish-eye disease; Fleck corneal dystrophy; Floating-Harbor syndrome; Focal epilepsy with speech disorder with or without mental retardation; Focal segmental glomerulosclerosis 5; Forebrain defects; Frank Ter Haar syndrome; Borrone Di Rocco Crovato syndrome; Frasier syndrome; Wilms tumor 1; Freeman-Sheldon syndrome; Frontometaphyseal dysplasia land 3; Frontotemporal dementia; Frontotemporal dementia and/or amyotrophic lateral sclerosis 3 and 4; Frontotemporal Dementia Chromosome 3-Linked and Frontotemporal dementia ubiquitin-positive; Fructose-biphosphatase deficiency; Fuhrmann syndrome; Gamma-aminobutyric acid transaminase deficiency; Gamstorp-Wohlfart syndrome; Gaucher disease type 1 and Subacute neuronopathic; Gaze palsy, familial horizontal, with progressive scoliosis; Generalized dominant dystrophic epidermolysis bullosa; Generalized epilepsy with febrile seizures plus 3, type 1, type 2; Epileptic encephalopathy Lennox-Gastaut type; Giant axonal neuropathy; Glanzmann thrombasthenia; Glaucoma 1, open angle, e, F, and G; Glaucoma 3, primary congenital, d; Glaucoma, congenital and Glaucoma, congenital, Coloboma; Glaucoma, primary open angle, juvenile-onset; Glioma susceptibility 1; Glucose transporter type 1 deficiency syndrome; Glucose-6-phosphate transport defect; GLUT1 deficiency syndrome 2; Epilepsy, idiopathic generalized, susceptibility to, 12; Glutamate formiminotransferase deficiency; Glutaric acidemia IIA and IIB; Glutaric aciduria, type 1; Gluthathione synthetase deficiency; Glycogen storage disease 0 (muscle), II (adult form), IXa2, IXc, type 1A; type II, type IV, IV (combined hepatic and myopathic), type V, and type VI; Goldmann-Favre syndrome; Gordon syndrome; Gorlin syndrome; Holoprosencephaly sequence; Holoprosencephaly 7; Granulomatous disease, chronic, X-linked, variant; Granulosa cell tumor of the ovary; Gray platelet syndrome; Griscelli syndrome type 3; Groenouw corneal dystrophy type I; Growth and mental retardation, mandibulofacial dysostosis, microcephaly, and cleft palate; Growth hormone deficiency with pituitary anomalies; Growth hormone insensitivity with immunodeficiency; GTP cyclohydrolase I deficiency; Hajdu-Cheney syndrome; Hand foot uterus syndrome; Hearing impairment; Hemangioma, capillary infantile; Hematologic neoplasm; Hemochromatosis type 1, 2B, and 3; Microvascular complications of diabetes 7; Transferrin serum level quantitative trait locus 2; Hemoglobin H disease, nondeletional; Hemolytic anemia, nonspherocytic, due to glucose phosphate isomerase deficiency; Hemophagocytic lymphohistiocytosis, familial, 2; Hemophagocytic lymphohistiocytosis, familial, 3; Heparin cofactor II deficiency; Hereditary acrodermatitis enteropathica; Hereditary breast and ovarian cancer syndrome; Ataxia-telangiectasia-like disorder; Hereditary diffuse gastric cancer; Hereditary diffuse leukoencephalopathy with spheroids; Hereditary factors II, IX, VIII deficiency disease; Hereditary hemorrhagic telangiectasia type 2; Hereditary insensitivity to pain with anhidrosis; Hereditary lymphedema type I; Hereditary motor and sensory neuropathy with optic atrophy; Hereditary myopathy with early respiratory failure; Hereditary neuralgic amyotrophy; Hereditary Nonpolyposis Colorectal Neoplasms; Lynch syndrome I and II; Hereditary pancreatitis; Pancreatitis, chronic, susceptibility to; Hereditary sensory and autonomic neuropathy type IIB and IIA; Hereditary sideroblastic anemia; Hermansky-Pudlak syndrome 1, 3, 4, and 6; Heterotaxy, visceral, 2, 4, and 6, autosomal; Heterotaxy, visceral, X-linked; Heterotopia; Histiocytic medullary reticulosis; Histiocytosis-lymphadenopathy plus syndrome; Holocarboxylase synthetase deficiency; Holoprosencephaly 2, 3, 7, and 9; Holt-Oram syndrome; Homocysteinemia due to MTHFR deficiency, CBS deficiency, and Homocystinuria, pyridoxine-responsive; Homocystinuria-Megaloblastic anemia due to defect in cobalamin metabolism, cblE complementation type; Howel-Evans syndrome; Hurler syndrome; Hutchinson-Gilford syndrome; Hydrocephalus; Hyperammonemia, type III; Hypercholesterolaemia and Hypercholesterolemia, autosomal recessive; Hyperekplexia 2 and Hyperekplexia hereditary; Hyperferritinemia cataract syndrome; Hyperglycinuria; Hyperimmunoglobulin D with periodic fever; Mevalonic aciduria; Hyperimmunoglobulin E syndrome; Hyperinsulinemic hypoglycemia familial 3, 4, and 5; Hyperinsulinism-hyperammonemia syndrome; Hyperlysinemia; Hypermanganesemia with dystonia, polycythemia and cirrhosis; Hyperornithinemia-hyperammonemia-homocitrullinuria syndrome; Hyperparathyroidism 1 and 2; Hyperparathyroidism, neonatal severe; Hyperphenylalaninemia, bh4-deficient, a, due to partial pts deficiency, BH4-deficient, D, and non-pku; Hyperphosphatasia with mental retardation syndrome 2, 3, and 4; Hypertrichotic osteochondrodysplasia; Hypobetalipoproteinemia, familial, associated with apob32; Hypocalcemia, autosomal dominant 1; Hypocalciuric hypercalcemia, familial, types 1 and 3; Hypochondrogenesis; Hypochromic microcytic anemia with iron overload; Hypoglycemia with deficiency of glycogen synthetase in the liver; Hypogonadotropic hypogonadism 11 with or without anosmia; Hypohidrotic ectodermal dysplasia with immune deficiency; Hypohidrotic X-linked ectodermal dysplasia; Hypokalemic periodic paralysis 1 and 2; Hypomagnesemia 1, intestinal; Hypomagnesemia, seizures, and mental retardation; Hypomyelinating leukodystrophy 7; Hypoplastic left heart syndrome; Atrioventricular septal defect and common atrioventricular junction; Hypospadias 1 and 2, X-linked; Hypothyroidism, congenital, nongoitrous, 1; Hypotrichosis 8 and 12; Hypotrichosis-lymphedema-telangiectasia syndrome; I blood group system; Ichthyosis bullosa of Siemens; Ichthyosis exfoliativa; Ichthyosis prematurity syndrome; Idiopathic basal ganglia calcification 5; Idiopathic fibrosing alveolitis, chronic form; Dyskeratosis congenita, autosomal dominant, 2 and 5; Idiopathic hypercalcemia of infancy; Immune dysfunction with T-cell inactivation due to calcium entry defect 2; Immunodeficiency 15, 16, 19, 30, 31C, 38, 40, 8, due to defect in cd3-zeta, with hyper IgM type 1 and 2, and X-Linked, with magnesium defect, Epstein-Barr virus infection, and neoplasia; Immunodeficiency-centromeric instability-facial anomalies syndrome 2; Inclusion body myopathy 2 and 3; Nonaka myopathy; Infantile convulsions and paroxysmal choreoathetosis, familial; Infantile cortical hyperostosis; Infantile GM1 gangliosidosis; Infantile hypophosphatasia; Infantile nephronophthisis; Infantile nystagmus, X-linked; Infantile Parkinsonism-dystonia; Infertility associated with multi-tailed spermatozoa and excessive DNA; Insulin resistance; Insulin-resistant diabetes mellitus and acanthosis nigricans; Insulin-dependent diabetes mellitus secretory diarrhea syndrome; Interstitial nephritis, karyomegalic; Intrauterine growth retardation, metaphyseal dysplasia, adrenal hypoplasia congenita, and genital anomalies; Iodotyrosyl coupling defect; IRAK4 deficiency; Iridogoniodysgenesis dominant type and type 1; Iron accumulation in brain; Ischiopatellar dysplasia; Islet cell hyperplasia; Isolated 17,20-lyase deficiency; Isolated lutropin deficiency; Isovaleryl-CoA dehydrogenase deficiency; Jankovic Rivera syndrome; Jervell and Lange-Nielsen syndrome 2; Joubert syndrome 1, 6, 7, 9/15 (digenic), 14, 16, and 17, and Orofaciodigital syndrome xiv; Junctional epidermolysis bullosa gravis of Herlitz; Juvenile GM>1<gangliosidosis; Juvenile polyposis syndrome; Juvenile polyposis/hereditary hemorrhagic telangiectasia syndrome; Juvenile retinoschisis; Kabuki make-up syndrome; Kallmann syndrome 1, 2, and 6; Delayed puberty; Kanzaki disease; Karak syndrome; Kartagener syndrome; Kenny-Caffey syndrome type 2; Keppen-Lubinsky syndrome; Keratoconus 1; Keratosis follicularis; Keratosis palmoplantaris striata 1; Kindler syndrome; L-2-hydroxyglutaric aciduria; Larsen syndrome, dominant type; Lattice corneal dystrophy Type III; Leber amaurosis; Zellweger syndrome; Peroxisome biogenesis disorders; Zellweger syndrome spectrum; Leber congenital amaurosis 11, 12, 13, 16, 4, 7, and 9; Leber optic atrophy; Aminoglycoside-induced deafness; Deafness, nonsyndromic sensorineural, mitochondrial; Left ventricular noncompaction 5; Left-right axis malformations; Leigh disease; Mitochondrial short-chain Enoyl-CoA Hydratase 1 deficiency; Leigh syndrome due to mitochondrial complex I deficiency; Leiner disease; Leri Weill dyschondrosteosis; Lethal congenital contracture syndrome 6; Leukocyte adhesion deficiency type I and III; Leukodystrophy, Hypomyelinating, 11 and 6; Leukoencephalopathy with ataxia, with Brainstem and Spinal Cord Involvement and Lactate Elevation, with vanishing white matter, and progressive, with ovarian failure; Leukonychia totalis; Lewy body dementia; Lichtenstein-Knorr Syndrome; Li-Fraumeni syndrome 1; Lig4 syndrome; Limb-girdle muscular dystrophy, type 1B, 2A, 2B, 2D, C1, C5, C9, C14; Congenital muscular dystrophy-dystroglycanopathy with brain and eye anomalies, type A14 and B14; Lipase deficiency combined; Lipid proteinosis; Lipodystrophy, familial partial, type 2 and 3; Lissencephaly 1, 2 (X-linked), 3, 6 (with microcephaly), X-linked; Subcortical laminar heterotopia, X-linked; Liver failure acute infantile; Loeys-Dietz syndrome 1, 2, 3; Long QT syndrome 1, 2, 2/9, 2/5, (digenic), 3, 5 and 5, acquired, susceptibility to; Lung cancer; Lymphedema, hereditary, id; Lymphedema, primary, with myelodysplasia; Lymphoproliferative syndrome 1, 1 (X-linked), and 2; Lysosomal acid lipase deficiency; Macrocephaly, macrosomia, facial dysmorphism syndrome; Macular dystrophy, vitelliform, adult-onset; Malignant hyperthermia susceptibility type 1; Malignant lymphoma, non-Hodgkin; Malignant melanoma; Malignant tumor of prostate; Mandibuloacral dysostosis; Mandibuloacral dysplasia with type A or B lipodystrophy, atypical; Mandibulofacial dysostosis, Treacher Collins type, autosomal recessive; Mannose-binding protein deficiency; Maple syrup urine disease type 1A and type 3; Marden Walker like syndrome; Marfan syndrome; Marinesco-Sj\xc3\xb6gren syndrome; Martsolf syndrome; Maturity-onset diabetes of the young, type 1, type 2, type 11, type 3, and type 9; May-Hegglin anomaly; MYH9 related disorders; Sebastian syndrome; McCune-Albright syndrome; Somatotroph adenoma; Sex cord-stromal tumor; Cushing syndrome; McKusick Kaufman syndrome; McLeod neuroacanthocytosis syndrome; Meckel-Gruber syndrome; Medium-chain acyl-coenzyme A dehydrogenase deficiency; Medulloblastoma; Megalencephalic leukoencephalopathy with subcortical cysts land 2a; Megalencephaly cutis marmorata telangiectatica congenital; PIK3CA Related Overgrowth Spectrum; Megalencephaly-polymicrogyria-polydactyly-hydrocephalus syndrome 2; Megaloblastic anemia, thiamine-responsive, with diabetes mellitus and sensorineural deafness; Meier-Gorlin syndromes land 4; Melnick-Needles syndrome; Meningioma; Mental retardation, X-linked, 3, 21, 30, and 72; Mental retardation and microcephaly with pontine and cerebellar hypoplasia; Mental retardation X-linked syndromic 5; Mental retardation, anterior maxillary protrusion, and strabismus; Mental retardation, autosomal dominant 12, 13, 15, 24, 3, 30, 4, 5, 6,and 9; Mental retardation, autosomal recessive 15, 44, 46, and 5; Mental retardation, stereotypic movements, epilepsy, and/or cerebral malformations; Mental retardation, syndromic, Claes-Jensen type, X-linked; Mental retardation, X-linked, nonspecific, syndromic, Hedera type, and syndromic, wu type; Merosin deficient congenital muscular dystrophy; Metachromatic leukodystrophy juvenile, late infantile, and adult types; Metachromatic leukodystrophy; Metatrophic dysplasia; Methemoglobinemia types I and 2; Methionine adenosyltransferase deficiency, autosomal dominant; Methylmalonic acidemia with homocystinuria; Methylmalonic aciduria cblB type; Methylmalonic aciduria due to methylmalonyl-CoA mutase deficiency; METHYLMALONIC ACIDURIA, mut(0) TYPE; Microcephalic osteodysplastic primordial dwarfism type 2; Microcephaly with or without chorioretinopathy, lymphedema, or mental retardation; Microcephaly, hiatal hernia and nephrotic syndrome; Microcephaly; Hypoplasia of the corpus callosum; Spastic paraplegia 50, autosomal recessive; Global developmental delay; CNS hypomyelination; Brain atrophy; Microcephaly, normal intelligence and immunodeficiency; Microcephaly-capillary malformation syndrome; Microcytic anemia; Microphthalmia syndromic 5, 7, and 9; Microphthalmia, isolated 3, 5, 6, 8, and with coloboma 6; Microspherophakia; Migraine, familial basilar; Miller syndrome; Minicore myopathy with external ophthalmoplegia; Myopathy, congenital with cores; Mitchell-Riley syndrome; mitochondrial 3-hydroxy-3-methylglutaryl-CoA synthase deficiency; Mitochondrial complex I, II, III, III (nuclear type 2, 4, or 8) deficiency; Mitochondrial DNA depletion syndrome 11, 12 (cardiomyopathic type), 2, 4B (MNGIE type), 8B (MNGIE type); Mitochondrial DNA-depletion syndrome 3 and 7, hepatocerebral types, and 13 (encephalomyopathic type); Mitochondrial phosphate carrier and pyruvate carrier deficiency; Mitochondrial trifunctional protein deficiency; Long-chain 3-hydroxyacyl-CoA dehydrogenase deficiency; Miyoshi muscular dystrophy 1; Myopathy, distal, with anterior tibial onset; Mohr-Tranebjaerg syndrome; Molybdenum cofactor deficiency, complementation group A; Mowat-Wilson syndrome; Mucolipidosis III Gamma; Mucopolysaccharidosis type VI, type VI (severe), and type VII; Mucopolysaccharidosis, MPS-I-H/S, MPS-II, MPS-III-A, MPS-III-B, MPS-III-C, MPS-IV-A, MPS-IV-B; Retinitis Pigmentosa 73; Gangliosidosis GM1 type1 (with cardiac involvement) 3; Multicentric osteolysis nephropathy; Multicentric osteolysis, nodulosis and arthropathy; Multiple congenital anomalies; Atrial septal defect 2; Multiple congenital anomalies-hypotonia-seizures syndrome 3; Multiple Cutaneous and Mucosal Venous Malformations; Multiple endocrine neoplasia, types land 4; Multiple epiphyseal dysplasia 5 or Dominant; Multiple gastrointestinal atresias; Multiple pterygium syndrome Escobar type; Multiple sulfatase deficiency; Multiple synostoses syndrome 3; Muscle AMP guanine oxidase deficiency; Muscle eye brain disease; Muscular dystrophy, congenital, megaconial type; Myasthenia, familial infantile, 1; Myasthenic Syndrome, Congenital, 11, associated with acetylcholine receptor deficiency; Myasthenic Syndrome, Congenital, 17, 2A (slow-channel), 4B (fast-channel), and without tubular aggregates; Myeloperoxidase deficiency; MYH-associated polyposis; Endometrial carcinoma; Myocardial infarction 1; Myoclonic dystonia; Myoclonic-Atonic Epilepsy; Myoclonus with epilepsy with ragged red fibers; Myofibrillar myopathy 1 and ZASP-related; Myoglobinuria, acute recurrent, autosomal recessive; Myoneural gastrointestinal encephalopathy syndrome; Cerebellar ataxia infantile with progressive external ophthalmoplegia; Mitochondrial DNA depletion syndrome 4B, MNGIE type; Myopathy, centronuclear, 1, congenital, with excess of muscle spindles, distal, 1, lactic acidosis, and sideroblastic anemia 1, mitochondrial progressive with congenital cataract, hearing loss, and developmental delay, and tubular aggregate, 2; Myopia 6; Myosclerosis, autosomal recessive; Myotonia congenital; Congenital myotonia, autosomal dominant and recessive forms; Nail-patella syndrome; Nance-Horan syndrome; Nanophthalmos 2; Navajo neurohepatopathy; Nemaline myopathy 3 and 9; Neonatal hypotonia; Intellectual disability; Seizures; Delayed speech and language development; Mental retardation, autosomal dominant 31; Neonatal intrahepatic cholestasis caused by citrin deficiency; Nephrogenic diabetes insipidus, Nephrogenic diabetes insipidus, X-linked; Nephrolithiasis/osteoporosis, hypophosphatemic, 2; Nephronophthisis 13, 15 and 4; Infertility; Cerebello-oculo-renal syndrome (nephronophthisis, oculomotor apraxia and cerebellar abnormalities); Nephrotic syndrome, type 3, type 5, with or without ocular abnormalities, type 7, and type 9; Nestor-Guillermo progeria syndrome; Neu-Laxova syndrome 1; Neurodegeneration with brain iron accumulation 4 and 6; Neuroferritinopathy; Neurofibromatosis, type land type 2; Neurofibrosarcoma; Neurohypophyseal diabetes insipidus; Neuropathy, Hereditary Sensory, Type IC; Neutral 1 amino acid transport defect; Neutral lipid storage disease with myopathy; Neutrophil immunodeficiency syndrome; Nicolaides-Baraitser syndrome; Niemann-Pick disease type C1, C2, type A, and type C1, adult form; Non-ketotic hyperglycinemia; Noonan syndrome 1 and 4, LEOPARD syndrome 1; Noonan syndrome-like disorder with or without juvenile myelomonocytic leukemia; Normokalemic periodic paralysis, potassium-sensitive; Norum disease; Epilepsy, Hearing Loss, And Mental Retardation Syndrome; Mental Retardation, X-Linked 102 and syndromic 13; Obesity; Ocular albinism, type I; Oculocutaneous albinism type 1B, type 3, and type 4; Oculodentodigital dysplasia; Odontohypophosphatasia; Odontotrichomelic syndrome; Oguchi disease; Oligodontia-colorectal cancer syndrome; Opitz G/BBB syndrome; Optic atrophy 9; Oral-facial-digital syndrome; Ornithine aminotransferase deficiency; Orofacial cleft 11 and 7, Cleft lip/palate-ectodermal dysplasia syndrome; Orstavik Lindemann Solberg syndrome; Osteoarthritis with mild chondrodysplasia; Osteochondritis dissecans; Osteogenesis imperfecta type 12, type 5, type 7, type 8, type I, type III, with normal sclerae, dominant form, recessive perinatal lethal; Osteopathia striata with cranial sclerosis; Osteopetrosis autosomal dominant type 1 and 2, recessive 4, recessive 1, recessive 6; Osteoporosis with pseudoglioma; Oto-palato-digital syndrome, types I and II; Ovarian dysgenesis 1; Ovarioleukodystrophy; Pachyonychia congenita 4 and type 2; Paget disease of bone, familial; Pallister-Hall syndrome; Palmoplantar keratoderma, nonepidermolytic, focal or diffuse; Pancreatic agenesis and congenital heart disease; Papillon-Lef\xc3\xa8vre syndrome; Paragangliomas 3; Paramyotonia congenita of von Eulenburg; Parathyroid carcinoma; Parkinson disease 14, 15, 19 (juvenile-onset), 2, 20 (early-onset), 6, (autosomal recessive early-onset, and 9; Partial albinism; Partial hypoxanthine-guanine phosphoribosyltransferase deficiency; Patterned dystrophy of retinal pigment epithelium; PC-K6a; Pelizaeus-Merzbacher disease; Pendred syndrome; Peripheral demyelinating neuropathy, central dysmyelination; Hirschsprung disease; Permanent neonatal diabetes mellitus; Diabetes mellitus, permanent neonatal, with neurologic features; Neonatal insulin-dependent diabetes mellitus; Maturity-onset diabetes of the young, type 2; Peroxisome biogenesis disorder 14B, 2A, 4A, 5B, 6A, 7A, and 7B; Perrault syndrome 4; Perry syndrome; Persistent hyperinsulinemic hypoglycemia of infancy; familial hyperinsulinism; Phenotypes; Phenylketonuria; Pheochromocytoma; Hereditary Paraganglioma-Pheochromocytoma Syndromes; Paragangliomas 1; Carcinoid tumor of intestine; Cowden syndrome 3; Phosphoglycerate dehydrogenase deficiency; Phosphoglycerate kinase 1 deficiency; Photosensitive trichothiodystrophy; Phytanic acid storage disease; Pick disease; Pierson syndrome; Pigmentary retinal dystrophy; Pigmented nodular adrenocortical disease, primary, 1; Pilomatrixoma; Pitt-Hopkins syndrome; Pituitary dependent hypercortisolism; Pituitary hormone deficiency, combined 1, 2, 3, and 4; Plasminogen activator inhibitor type 1 deficiency; Plasminogen deficiency, type I; Platelet-type bleeding disorder 15 and 8; Poikiloderma, hereditary fibrosing, with tendon contractures, myopathy, and pulmonary fibrosis; Polycystic kidney disease 2, adult type, and infantile type; Polycystic lipomembranous osteodysplasia with sclerosing leukoencephalopathy; Polyglucosan body myopathy 1 with or without immunodeficiency; Polymicrogyria, asymmetric, bilateral frontoparietal; Polyneuropathy, hearing loss, ataxia, retinitis pigmentosa, and cataract; Pontocerebellar hypoplasia type 4; Popliteal pterygium syndrome; Porencephaly 2; Porokeratosis 8, disseminated superficial actinic type; Porphobilinogen synthase deficiency; Porphyria cutanea tarda; Posterior column ataxia with retinitis pigmentosa; Posterior polar cataract type 2; Prader-Willi-like syndrome; Premature ovarian failure 4, 5, 7, and 9; Primary autosomal recessive microcephaly 10, 2, 3, and 5; Primary ciliary dyskinesia 24; Primary dilated cardiomyopathy; Left ventricular noncompaction 6; 4, Left ventricular noncompaction 10; Paroxysmal atrial fibrillation; Primary hyperoxaluria, type I, type, and type III; Primary hypertrophic osteoarthropathy, autosomal recessive 2; Primary hypomagnesemia; Primary open angle glaucoma juvenile onset 1; Primary pulmonary hypertension; Primrose syndrome; Progressive familial heart block type 1B; Progressive familial intrahepatic cholestasis 2 and 3; Progressive intrahepatic cholestasis; Progressive myoclonus epilepsy with ataxia; Progressive pseudorheumatoid dysplasia; Progressive sclerosing poliodystrophy; Prolidase deficiency; Proline dehydrogenase deficiency; Schizophrenia 4; Properdin deficiency, X-linked; Propionic academia; Proprotein convertase 1/3 deficiency; Prostate cancer, hereditary, 2; Protan defect; Proteinuria; Finnish congenital nephrotic syndrome; Proteus syndrome; Breast adenocarcinoma; Pseudoachondroplastic spondyloepiphyseal dysplasia syndrome; Pseudohypoaldosteronism type 1 autosomal dominant and recessive and type 2; Pseudohypoparathyroidism type 1A, Pseudopseudohypoparathyroidism; Pseudoneonatal adrenoleukodystrophy; Pseudoprimary hyperaldosteronism; Pseudoxanthoma elasticum; Generalized arterial calcification of infancy 2; Pseudoxanthoma elasticum-like disorder with multiple coagulation factor deficiency; Psoriasis susceptibility 2; PTEN hamartoma tumor syndrome; Pulmonary arterial hypertension related to hereditary hemorrhagic telangiectasia; Pulmonary Fibrosis And/Or Bone Marrow Failure, Telomere-Related, 1 and 3; Pulmonary hypertension, primary, 1, with hereditary hemorrhagic telangiectasia; Purine-nucleoside phosphorylase deficiency; Pyruvate carboxylase deficiency; Pyruvate dehydrogenase E1-alpha deficiency; Pyruvate kinase deficiency of red cells; Raine syndrome; Rasopathy; Recessive dystrophic epidermolysis bullosa; Nail disorder, nonsyndromic congenital, 8; Reifenstein syndrome; Renal adysplasia; Renal carnitine transport defect; Renal coloboma syndrome; Renal dysplasia; Renal dysplasia, retinal pigmentary dystrophy, cerebellar ataxia and skeletal dysplasia; Renal tubular acidosis, distal, autosomal recessive, with late-onset sensorineural hearing loss, or with hemolytic anemia; Renal tubular acidosis, proximal, with ocular abnormalities and mental retardation; Retinal cone dystrophy 3B; Retinitis pigmentosa; Retinitis pigmentosa 10, 11, 12, 14, 15, 17, and 19; Retinitis pigmentosa 2, 20, 25, 35, 36, 38, 39, 4, 40, 43, 45, 48, 66, 7, 70, 72; Retinoblastoma; Rett disorder; Rhabdoid tumor predisposition syndrome 2; Rhegmatogenous retinal detachment, autosomal dominant; Rhizomelic chondrodysplasia punctata type 2 and type 3; Roberts-SC phocomelia syndrome; Robinow Sorauf syndrome; Robinow syndrome, autosomal recessive, autosomal recessive, with brachy-syn-polydactyly; Rothmund-Thomson syndrome; Rapadilino syndrome; RRM2B-related mitochondrial disease; Rubinstein-Taybi syndrome; Salla disease; Sandhoff disease, adult and infantil types; Sarcoidosis, early-onset; Blau syndrome; Schindler disease, type 1; Schizencephaly; Schizophrenia 15; Schneckenbecken dysplasia; Schwannomatosis 2; Schwartz Jampel syndrome type 1; Sclerocornea, autosomal recessive; Sclerosteosis; Secondary hypothyroidism; Segawa syndrome, autosomal recessive; Senior-Loken syndrome 4 and 5; Sensory ataxic neuropathy, dysarthria, and ophthalmoparesis; Sepiapterin reductase deficiency; SeSAME syndrome; Severe combined immunodeficiency due to ADA deficiency, with microcephaly, growth retardation, and sensitivity to ionizing radiation, atypical, autosomal recessive, T cell-negative, B cell-positive, NK cell-negative of NK-positive; Severe congenital neutropenia; Severe congenital neutropenia 3, autosomal recessive or dominant; Severe congenital neutropenia and 6, autosomal recessive; Severe myoclonic epilepsy in infancy; Generalized epilepsy with febrile seizures plus, types 1 and 2; Severe X-linked myotubular myopathy; Short QT syndrome 3; Short stature with nonspecific skeletal abnormalities; Short stature, auditory canal atresia, mandibular hypoplasia, skeletal abnormalities; Short stature, onychodysplasia, facial dysmorphism, and hypotrichosis; Primordial dwarfism; Short-rib thoracic dysplasia 11 or 3 with or without polydactyly; Sialidosis type I and II; Silver spastic paraplegia syndrome; Slowed nerve conduction velocity, autosomal dominant; Smith-Lemli-Opitz syndrome; Snyder Robinson syndrome; Somatotroph adenoma; Prolactinoma; familial, Pituitary adenoma predisposition; Sotos syndrome 1 or 2; Spastic ataxia 5, autosomal recessive, Charlevoix-Saguenay type, 1, 10, or 11, autosomal recessive; Amyotrophic lateral sclerosis type 5; Spastic paraplegia 15, 2, 3, 35, 39, 4, autosomal dominant, 55, autosomal recessive, and 5A; Bile acid synthesis defect, congenital, 3; Spermatogenic failure 11, 3, and 8; Spherocytosis types 4 and 5; Spheroid body myopathy; Spinal muscular atrophy, lower extremity predominant 2, autosomal dominant; Spinal muscular atrophy, type II; Spinocerebellar ataxia 14, 21, 35, 40,and 6; Spinocerebellar ataxia autosomal recessive 1 and 16; Splenic hypoplasia; Spondylocarpotarsal synostosis syndrome; Spondylocheirodysplasia, Ehlers-Danlos syndrome-like, with immune dysregulation, Aggrecan type, with congenital joint dislocations, short limb-hand type, Sedaghatian type, with cone-rod dystrophy, and Kozlowski type; Parastremmatic dwarfism; Stargardt disease 1; Cone-rod dystrophy 3; Stickler syndrome type 1; Kniest dysplasia; Stickler syndrome, types 1(nonsyndromic ocular) and 4; Sting-associated vasculopathy, infantile-onset; Stormorken syndrome; Sturge-Weber syndrome, Capillary malformations, congenital, 1; Succinyl-CoA acetoacetate transferase deficiency; Sucrase-isomaltase deficiency; Sudden infant death syndrome; Sulfite oxidase deficiency, isolated; Supravalvar aortic stenosis; Surfactant metabolism dysfunction, pulmonary, 2 and 3; Symphalangism, proximal, lb; Syndactyly Cenani Lenz type; Syndactyly type 3; Syndromic X-linked mental retardation 16; Talipes equinovarus; Tangier disease; TARP syndrome; Tay-Sachs disease, B1 variant, Gm2-gangliosidosis (adult), Gm2-gangliosidosis (adult-onset); Temtamy syndrome; Tenorio Syndrome; Terminal osseous dysplasia; Testosterone 17-beta-dehydrogenase deficiency; Tetraamelia, autosomal recessive; Tetralogy of Fallot; Hypoplastic left heart syndrome 2; Truncus arteriosus; Malformation of the heart and great vessels; Ventricular septal defect 1; Thiel-Behnke corneal dystrophy; Thoracic aortic aneurysms and aortic dissections; Marfanoid habitus; Three M syndrome 2; Thrombocytopenia, platelet dysfunction, hemolysis, and imbalanced globin synthesis; Thrombocytopenia, X-linked; Thrombophilia, hereditary, due to protein C deficiency, autosomal dominant and recessive; Thyroid agenesis; Thyroid cancer, follicular; Thyroid hormone metabolism, abnormal; Thyroid hormone resistance, generalized, autosomal dominant; Thyrotoxic periodic paralysis and Thyrotoxic periodic paralysis 2; Thyrotropin-releasing hormone resistance, generalized; Timothy syndrome; TNF receptor-associated periodic fever syndrome (TRAPS); Tooth agenesis, selective, 3 and 4; Torsades de pointes; Townes-Brocks-branchiootorenal-like syndrome; Transient bullous dermolysis of the newborn; Treacher collins syndrome 1; Trichomegaly with mental retardation, dwarfism and pigmentary degeneration of retina; Trichorhinophalangeal dysplasia type I; Trichorhinophalangeal syndrome type 3; Trimethylaminuria; Tuberous sclerosis syndrome; Lymphangiomyomatosis; Tuberous sclerosis 1 and 2; Tyrosinase-negative oculocutaneous albinism; Tyrosinase-positive oculocutaneous albinism; Tyrosinemia type I; UDPglucose-4-epimerase deficiency; Ullrich congenital muscular dystrophy; Ulna and fibula absence of with severe limb deficiency; Upshaw-Schulman syndrome; Urocanate hydratase deficiency; Usher syndrome, types 1, 1B, 1D, 1G, 2A, 2C, and 2D; Retinitis pigmentosa 39; UV-sensitive syndrome; Van der Woude syndrome; Van Maldergem syndrome 2; Hennekam lymphangiectasia-lymphedema syndrome 2; Variegate porphyria; Ventriculomegaly with cystic kidney disease; Verheij syndrome; Very long chain acyl-CoA dehydrogenase deficiency; Vesicoureteral reflux 8; Visceral heterotaxy 5, autosomal; Visceral myopathy; Vitamin D-dependent rickets, types land 2; Vitelliform dystrophy; von Willebrand disease type 2M and type 3; Waardenburg syndrome type 1, 4C, and 2E (with neurologic involvement); Klein-Waardenberg syndrome; Walker-Warburg congenital muscular dystrophy; Warburg micro syndrome 2 and 4; Warts, hypogammaglobulinemia, infections, and myelokathexis; Weaver syndrome; Weill-Marchesani syndrome 1 and 3; Weill-Marchesani-like syndrome; Weissenbacher-Zweymuller syndrome; Werdnig-Hoffmann disease; Charcot-Marie-Tooth disease; Werner syndrome; WFS1-Related Disorders; Wiedemann-Steiner syndrome; Wilson disease; Wolfram-like syndrome, autosomal dominant; Worth disease; Van Buchem disease type 2; Xeroderma pigmentosum, complementation group b, group D, group E, and group G; X-linked agammaglobulinemia; X-linked hereditary motor and sensory neuropathy; X-linked ichthyosis with steryl-sulfatase deficiency; X-linked periventricular heterotopia; Oto-palato-digital syndrome, type I; X-linked severe combined immunodeficiency; Zimmermann-Laband syndrome and Zimmermann-Laband syndrome 2; and Zonular pulverulent cataract 3.

[0961] The target nucleotide sequence may comprise a target sequence (e.g., a point mutation) associated with a disease, disorder, or condition. The target sequence may comprise a T to C (or A to G) point mutation associated with a disease, disorder, or condition, and wherein the deamination of the mutant C base results in mismatch repair-mediated correction to a sequence that is not associated with a disease, disorder, or condition. The target sequence may comprise a G to A (or C to T) point mutation associated with a disease, disorder, or condition, and wherein the deamination of the mutant A base results in mismatch repair-mediated correction to a sequence that is not associated with a disease, disorder, or condition. The target sequence may encode a protein, and where the point mutation is in a codon and results in a change in the amino acid encoded by the mutant codon as compared to a wild-type codon. The target sequence may also be at a splice site, and the point mutation results in a change in the splicing of an mRNA transcript as compared to a wild-type transcript. In addition, the target may be at a non-coding sequence of a gene, such as a promoter, and the point mutation results in increased or decreased expression of the gene.

[0962] Thus, in some aspects, the deamination of a mutant C results in a change of the amino acid encoded by the mutant codon, which in some cases can result in the expression of a wild-type amino acid. In other aspects, the deamination of a mutant A results in a change of the amino acid encoded by the mutant codon, which in some cases can result in the expression of a wild-type amino acid.

[0963] The methods described herein involving contacting a cell with a composition or rAAV particle can occur in vitro, ex vivo, or in vivo. In certain embodiments, the step of contacting occurs in a subject. In certain embodiments, the subject has been diagnosed with a disease, disorder, or condition.

[0964] In some embodiments, the methods disclosed herein involve contacting a mammalian cell with a composition or rAAV particle. In particular embodiments, the methods involve contacting a retinal cell, cortical cell or cerebellar cell.

[0965] The split Cas9 protein or split prime editor delivered using the methods described herein preferably have comparable activity compared to the original Cas9 protein or prime editor (i.e., unsplit protein delivered to a cell or expressed in a cell as a whole). For example, the split Cas9 protein or split prime editor retains at least 50% (e.g., at least 50%, at least 60%, at least 70%, at least 80%, at least 90%, at least 95%, at least 98%, at least 99%, or 100%) of the activity of the original Cas9 protein or prime editor. In some embodiments, the split Cas9 protein or split prime editor is more active (e.g., 2-fold, 5-fold, 10-fold, 100-fold, 1000-fold, or more) than that of an original Cas9 protein or prime editor.

[0966] The compositions described herein may be administered to a subject in need thereof in a therapeutically effective amount to treat and/or prevent a disease or disorder the subject is suffering from. Any disease or disorder that maybe treated and/or prevented using CRISPR/Cas9-based genome-editing technology may be treated by the split Cas9 protein or the split prime editor described herein. It is to be understood that, if the nucleotide sequences encoding the split Cas9 protein or the prime editor does not further encode a gRNA, a separate nucleic acid vector encoding the gRNA may be administered together with the compositions described herein.

[0967] Exemplary suitable diseases, disorders or conditions include, without limitation the disease or disorder is selected from the group consisting of: cystic fibrosis, phenylketonuria, epidermolytic hyperkeratosis (EHK), chronic obstructive pulmonary disease (COPD), Charcot-Marie-Toot disease type 4J, neuroblastoma (NB), von Willebrand disease (vWD), myotonia congenital, hereditary renal amyloidosis, dilated cardiomyopathy, hereditary lymphedema, familial Alzheimer's disease, prion disease, chronic infantile neurologic cutaneous articular syndrome (CINCA), congenital deafness, Niemann-Pick disease type C (NPC) disease, and desmin-related myopathy (DRM). In particular embodiments, the disease or condition is Niemann-Pick disease type C (NPC) disease.

[0968] In some embodiments, the disease, disorder or condition is associated with a point mutation in an NPC gene, a DNMT1 gene, a PCSK9 gene, or a TMC1 gene. In certain embodiments, the point mutation is a T3182C mutation in NPC, which results in an I1061T amino acid substitution.

[0969] In certain embodiments, the point mutation is an A545G mutation in TMC1, which results in a Y182C amino acid substitution. TMC1 encodes a protein that forms mechanosensitive ion channels in sensory hair cells of the inner ear and is required for normal auditory function. The Y182C amino acid substitution is associated with congenital deafness.

[0970] In some embodiments, the disease, disorder or condition is associated with a point mutation that generates a stop codon, for example, a premature stop codon within the coding region of a gene.

[0971] Additional exemplary diseases, disorders and conditions include cystic fibrosis (see, e.g., Schwank et al., Functional repair of CFTR by CRISPR/Cas9 in intestinal stem cell organoids of cystic fibrosis patients. Cell stem cell. 2013; 13: 653-658; and Wu et. al., Correction of a genetic disease in mouse via use of CRISPR-Cas9. Cell stem cell. 2013; 13: 659-662, neither of which uses a deaminase fusion protein to correct the genetic defect); phenylketonuria—e.g., phenylalanine to serine mutation at position 835 (mouse) or 240 (human) or a homologous residue in phenylalanine hydroxylase gene (T>C mutation)—see, e.g., McDonald et al., Genomics. 1997; 39:402-405; Bernard-Soulier syndrome (BSS)—e.g., phenylalanine to serine mutation at position 55 or a homologous residue, or cysteine to arginine at residue 24 or a homologous residue in the platelet membrane glycoprotein IX (T>C mutation)—see, e.g., Noris et al., British Journal of Haematology. 1997; 97: 312-320, and Ali et al., Hematol. 2014; 93: 381-384; epidermolytic hyperkeratosis (EHK)—e.g., leucine to proline mutation at position 160 or 161 (if counting the initiator methionine) or a homologous residue in keratin 1 (T>C mutation)—see, e.g., Chipev et al., Cell. 1992; 70: 821-828, see also accession number P04264 in the UNIPROT database at www[dot]uniprot[dot]org; chronic obstructive pulmonary disease (COPD)—e.g., leucine to proline mutation at position 54 or 55 (if counting the initiator methionine) or a homologous residue in the processed form of ai-antitrypsin or residue 78 in the unprocessed form or a homologous residue (T>C mutation)—see, e.g., Poller et al., Genomics. 1993; 17: 740-743, see also accession number P01011 in the UNIPROT database; Charcot-Marie-Toot disease type 4J—e.g., isoleucine to threonine mutation at position 41 or a homologous residue in FIG. 4 (T>C mutation)—see, e.g., Lenk et al., PLoS Genetics. 2011; 7: e1002104; neuroblastoma (NB)—e.g., leucine to proline mutation at position 197 or a homologous residue in Caspase-9 (T>C mutation)—see, e.g., Kundu et al., 3 Biotech. 2013, 3:225-234; von Willebrand disease (vWD)—e.g., cysteine to arginine mutation at position 509 or a homologous residue in the processed form of von Willebrand factor, or at position 1272 or a homologous residue in the unprocessed form of von Willebrand factor (T>C mutation)—see, e.g., Lavergne et al., Br. J. Haematol. 1992, see also accession number P04275 in the UNIPROT database; 82: 66-72; myotonia congenital—e.g., cysteine to arginine mutation at position 277 or a homologous residue in the muscle chloride channel gene CLCN1 (T>C mutation)—see, e.g., Weinberger et al., The J. of Physiology. 2012; 590: 3449-3464; hereditary renal amyloidosis—e.g., stop codon to arginine mutation at position 78 or a homologous residue in the processed form of apolipoprotein A11 or at position 101 or a homologous residue in the unprocessed form (T>C mutation)—see, e.g., Yazaki et al., Kidney Int. 2003; 64: 11-16; dilated cardiomyopathy (DCM)—e.g., tryptophan to Arginine mutation at position 148 or a homologous residue in the FOXD4 gene (T>C mutation), see, e.g., Minoretti et. al., Int. J. of Mol. Med. 2007; 19: 369-372; hereditary lymphedema—e.g., histidine to arginine mutation at position 1035 or a homologous residue in VEGFR3 tyrosine kinase (A>G mutation), see, e.g., Irrthum et al., Am. J. Hum. Genet. 2000; 67: 295-301; familial Alzheimer's disease—e.g., isoleucine to valine mutation at position 143 or a homologous residue in presenilin1 (A>G mutation), see, e.g., Gallo et. al., J. Alzheimer's disease. 2011; 25: 425-431; Prion disease—e.g., methionine to valine mutation at position 129 or a homologous residue in prion protein (A>G mutation)—see, e.g., Lewis et. al., J. of General Virology. 2006; 87: 2443-2449; chronic infantile neurologic cutaneous articular syndrome (CINCA)—e.g., Tyrosine to Cysteine mutation at position 570 or a homologous residue in cryopyrin (A>G mutation)—see, e.g., Fujisawa et. al. Blood. 2007; 109: 2903-2911; and desmin-related myopathy (DRM)—e.g., arginine to glycine mutation at position 120 or a homologous residue in αβ crystallin (A>G mutation)—see, e.g., Kumar et al., J. Biol. Chem. 1999; 274: 24137-24141. The entire contents of all references and database entries is incorporated herein by reference.

### Trinucleotide Repeat Expansion Disease

[0972] Trinucleotide repeat expansion is associated with a number of human diseases, including Huntington's Disease, Fragile X syndrome, and Friedreich's ataxia. The most common trinucleotide repeat contains CAG triplets, though GAA triplets (Friedreich's ataxia) and CGG triplets (Fragile X syndrome) also occur. Inheriting a predisposition to expansion, or acquiring an already expanded parental allele, increases the likelihood of acquiring the disease. Pathogenic expansions of trinucleotide repeats could hypothetically be corrected using prime editing.

[0973] A region upstream of the repeat region can be nicked by an RNA-guided nuclease, then used to prime synthesis of a new DNA strand that contains a healthy number of repeats (which depends on the particular gene and disease), in accordance with the general mechanism outlined in FIG. 1G or FIG. 22. After the repeat sequence, a short stretch of homology is added that matches the identity of the sequence adjacent to the other end of the repeat (red strand). Invasion of the newly synthesized strand by the prime editor, and subsequent replacement of the endogenous DNA with the newly synthesized flap, leads to a contracted repeat allele. The term “contracted” refers to a shortening of the length of the nucleotide repeat region, thereby resulting in repairing the trinucleotide repeat region.

[0974] The prime editing system or prime editing (PE) system described herein may be used to contract trinucleotide repeat mutations (or “triplet expansion diseases”) to treating conditions such as Huntington's disease and other trinucleotide repeat disorders. Trinucleotide repeat expansion disorders are complex, progressive disorders that involve developmental neurobiology and often affect cognition as well as sensori-motor functions. The disorders show genetic anticipation (i.e. increased severity with each generation). The DNA expansions or contractions usually happen meiotically (i.e. during the time of gametogenesis, or early in embryonic development), and often have sex-bias meaning that some genes expand only when inherited through the female, others only through the male. In humans, trinucleotide repeat expansion disorders can cause gene silencing at either the transcriptional or translational level, which essentially knocks out gene function. Alternatively, trinucleotide repeat expansion disorders can cause altered proteins generated with large repetitive amino acid sequences that either abrogate or change protein function, often in a dominant-negative manner (e.g. poly-glutamine diseases).

[0975] Without wishing to be bound by theory, triplet expansion is caused by slippage during DNA replication or during DNA repair synthesis. Because the tandem repeats have identical sequence to one another, base pairing between two DNA strands can take place at multiple points along the sequence. This may lead to the formation of “loop out” structures during DNA replication or DNA repair synthesis. This may lead to repeated copying of the repeated sequence, expanding the number of repeats. Additional mechanisms involving hybrid RNA:DNA intermediates have been proposed. Prime editing may be used to reduce or eliminate these triplet expansion regions by deletion one or more or the offending repeat codon triplets. In an embodiment of this use, FIG. 23, provides a schematic of a pegRNA design for contracting or reducing trinucleotide repeat sequences with prime editing.

[0976] Prime editing may be implemented to contract triplet expansion regions by nicking a region upstream of the triplet repeat region with the prime editor comprising a pegRNA appropriated targeted to the cut site. The prime editor then synthesizes a new DNA strand (ssDNA flap) based on the pegRNA as a template (i.e., the edit template thereof) that codes for a healthy number of triplet repeats (which depends on the particular gene and disease). The newly synthesized ssDNA strand comprising the healthy triplet repeat sequence also is synthesized to include a short stretch of homology (i.e., the homology arm) that matches the sequence adjacent to the other end of the repeat (red strand). Invasion of the newly synthesized strand, and subsequent replacement of the endogenous DNA with the newly synthesized ssDNA flap, leads to a contracted repeat allele.

[0977] Depending on the particular trinucleotide expansion disorder, the defect-inducing triplet expansions may occur in “trinucleotide repeat expansion proteins.” Trinucleotide repeat expansion proteins are a diverse set of proteins associated with susceptibility for developing a trinucleotide repeat expansion disorder, the presence of a trinucleotide repeat expansion disorder, the severity of a trinucleotide repeat expansion disorder or any combination thereof. Trinucleotide repeat expansion disorders are divided into two categories determined by the type of repeat. The most common repeat is the triplet CAG, which, when present in the coding region of a gene, codes for the amino acid glutamine (Q). Therefore, these disorders are referred to as the polyglutamine (polyQ) disorders and comprise the following diseases: Huntington Disease (HD); Spinobulbar Muscular Atrophy (SBMA); Spinocerebellar Ataxias (SCA types 1, 2, 3, 6, 7, and 17); and Dentatorubro-Pallidoluysian Atrophy (DRPLA). The remaining trinucleotide repeat expansion disorders either do not involve the CAG triplet or the CAG triplet is not in the coding region of the gene and are, therefore, referred to as the non-polyglutamine disorders. The non-polyglutamine disorders comprise Fragile X Syndrome (FRAXA); Fragile XE Mental Retardation (FRAXE); Friedreich Ataxia (FRDA); Myotonic Dystrophy (DM); and Spinocerebellar Ataxias (SCA types 8, and 12).

[0978] The proteins associated with trinucleotide repeat expansion disorders can be selected based on an experimental association of the protein associated with a trinucleotide repeat expansion disorder to a trinucleotide repeat expansion disorder. For example, the production rate or circulating concentration of a protein associated with a trinucleotide repeat expansion disorder may be elevated or depressed in a population having a trinucleotide repeat expansion disorder relative to a population lacking the trinucleotide repeat expansion disorder. Differences in protein levels may be assessed using proteomic techniques including but not limited to Western blot, immunohistochemical staining, enzyme linked immunosorbent assay (ELISA), and mass spectrometry. Alternatively, the proteins associated with trinucleotide repeat expansion disorders may be identified by obtaining gene expression profiles of the genes encoding the proteins using genomic techniques including but not limited to DNA microarray analysis, serial analysis of gene expression (SAGE), and quantitative real-time polymerase chain reaction (Q-PCR).

[0979] Non-limiting examples of proteins associated with trinucleotide repeat expansion disorders which can be corrected by prime editing include AR (androgen receptor), FMR1 (fragile X mental retardation 1), HTT (huntingtin), DMPK (dystrophia myotonica-protein kinase), FXN (frataxin), ATXN2 (ataxin 2), ATN1 (atrophin 1), FEN1 (flap structure-specific endonuclease 1), TNRC6A (trinucleotide repeat containing 6A), PABPN1 (poly(A) binding protein, nuclear 1), JPH3 (junctophilin 3), MED15 (mediator complex subunit 15), ATXN1 (ataxin 1), ATXN3 (ataxin 3), TBP (TATA box binding protein), CACNA1A (calcium channel, voltage-dependent, P/Q type, alpha 1A subunit), ATXN80S (ATXN8 opposite strand (non-protein coding)), PPP2R2B (protein phosphatase 2, regulatory subunit B, beta), ATXN7 (ataxin 7), TNRC6B (trinucleotide repeat containing 6B), TNRC6C (trinucleotide repeat containing 6C), CELF3 (CUGBP, Elav-like family member 3), MAB21L1 (mab-21-like 1 (C. elegans)), MSH2 (mutS homolog 2, colon cancer, nonpolyposis type 1 (E. coli)), TMEM185A (transmembrane protein 185A), SIX5 (SIX homeobox 5), CNPY3 (canopy 3 homolog (zebrafish)), FRAXE (fragile site, folic acid type, rare, fra(X)(q28) E), GNB2 (guanine nucleotide binding protein (G protein), beta polypeptide 2), RPL14 (ribosomal protein L14), ATXN8 (ataxin 8), INSR (insulin receptor), TTR (transthyretin), EP400 (E1A binding protein p400), GIGYF2 (GRB10 interacting GYF protein 2), OGG1 (8-oxoguanine DNA glycosylase), STC1 (stanniocalcin 1), CNDP1 (carnosine dipeptidase 1 (metallopeptidase M20 family)), C10orf2 (chromosome 10 open reading frame 2), MAML3 mastermind-like 3 (Drosophila), DKC1 (dyskeratosis congenita 1, dyskerin), PAXIP1 (PAX interacting (with transcription-activation domain) protein 1), CASK (calcium/calmodulin-dependent serine protein kinase (MAGUK family)), MAPT (microtubule-associated protein tau), SP1 (Sp1 transcription factor), POLG (polymerase (DNA directed), gamma), AFF2 (AF4/FMR2 family, member 2), THBS1 (thrombospondin 1), TP53 (tumor protein p53), ESR1 (estrogen receptor 1), CGGBP1 (CGG triplet repeat binding protein 1), ABT1 (activator of basal transcription 1), KLK3 (kallikrein-related peptidase 3), PRNP (prion protein), JUN (jun oncogene), KCNN3 (potassium intermediate/small conductance calcium-activated channel, subfamily N, member 3), BAX (BCL2-associated X protein), FRAXA (fragile site, folic acid type, rare, fra(X)(q27.3) A (macroorchidism, mental retardation)), KBTBD10 (kelch repeat and BTB (POZ) domain containing 10), MBNL1 (muscleblind-like (Drosophila)), RAD51 (RAD51 homolog (RecA homolog, E. coli) (S. cerevisiae)), NCOA3 (nuclear receptor coactivator 3), ERDAl (expanded repeat domain, CAG/CTG 1), TSC1 (tuberous sclerosis 1), COMP (cartilage oligomeric matrix protein), GCLC (glutamate-cysteine ligase, catalytic subunit), RRAD (Ras-related associated with diabetes), MSH3 (mutS homolog 3 (E. coli)), DRD2 (dopamine receptor D2), CD44 (CD44 molecule (Indian blood group)), CTCF (CCCTC-binding factor (zinc finger protein)), CCND1 (cyclin D1), CLSPN (claspin homolog (Xenopus laevis)), MEF2A (myocyte enhancer factor 2A), PTPRU (protein tyrosine phosphatase, receptor type, U), GAPDH (glyceraldehyde-3-phosphate dehydrogenase), TRIM22 (tripartite motif-containing 22), WT1 (Wilms tumor 1), AHR (aryl hydrocarbon receptor), GPX1 (glutathione peroxidase 1), TPMT (thiopurine S-methyltransferase), NDP (Norrie disease (pseudoglioma)), ARX (aristaless related homeobox), MUS81 (MUS81 endonuclease homolog (S. cerevisiae)), TYR (tyrosinase (oculocutaneous albinism IA)), EGR1 (early growth response 1), UNG (uracil-DNA glycosylase), NUMBL (numb homolog (Drosophila)-like), FABP2 (fatty acid binding protein 2, intestinal), EN2 (engrailed homeobox 2), CRYGC (crystallin, gamma C), SRP14 (signal recognition particle 14 kDa (homologous Alu RNA binding protein)), CRYGB (crystallin, gamma B), PDCD1 (programmed cell death 1), HOXA1 (homeobox A1), ATXN2L (ataxin 2-like), PMS2 (PMS2 postmeiotic segregation increased 2 (S. cerevisiae)), GLA (galactosidase, alpha), CBL (Cas-Br-M (murine) ecotropic retroviral transforming sequence), FTH1 (ferritin, heavy polypeptide 1), IL12RB2 (interleukin 12 receptor, beta 2), OTX2 (orthodenticle homeobox 2), HOXA5 (homeobox A5), POLG2 (polymerase (DNA directed), gamma 2, accessory subunit), DLX2 (distal-less homeobox 2), SIRPA (signal-regulatory protein alpha), OTX1 (orthodenticle homeobox 1), AHRR (aryl-hydrocarbon receptor repressor), MANF (mesencephalic astrocyte-derived neurotrophic factor), TMEM158 (transmembrane protein 158 (gene/pseudogene)), and ENSG00000078687.

[0980] In a particular aspect, the instant disclosure provides prime editing for the treatment of a subject diagnosed with an expansion repeat disorder (also known as a repeat expansion disorder or a trinucleotide repeat disorder). Expansion repeat disorders occur when microsatellite repeats expand beyond a threshold length. Currently, at least 30 genetic diseases are believed to be caused by repeat expansions. Scientific understanding of this diverse group of disorders came to lights in the early 1990's with the discovery that trinucleotide repeats underlie several major inherited conditions, including Fragile X, Spinal and Bulbar Muscular Atrophy, Myotonic Dystrophy, and Huntington's disease (Nelson et al, “The unstable repeats—three evolving faces of neurological disease,” Neuron, Mar. 6, 2013, Vol. 77; 825-843, which is incorporated herein by reference), as well as Haw River Syndrome, Jacobsen Syndrome, Dentatorubral-pallidoluysian atrophy (DRPLA), Machado-Joseph disease, Synpolydactyly (SPD II), Hand-foot genital syndrome (HFGS), Cleidocranial dysplasia (CCD), Holoprosencephaly disorder (HPE), Congenital central hypventilation syndrome (CCHS), ARX-nonsyndromic X-linked mental retardation (XLMR), and Oculopharyngeal muscular dystrophy (OPMD) (see. Microsatellite repeat instability was found to be a hallmark of these conditions, as was anticipation—the phenomenon in which repeat expansion can occur with each successive generation, which leads to a more severe phenotype and earlier age of onset in the offspring. Repeat expansions are believed to cause diseases via several different mechanisms. Namely, expansions may interfere with cellular functioning at the level of the gene, the mRNA transcript, and/or the encoded protein. In some conditions, mutations act via a loss-of-function mechanism by silencing repeat-containing genes. In others, disease results from gain-of-function mechanisms, whereby either the mRNA transcript or protein takes on new, aberrant functions.

[0981] In one embodiment, a method of treating a trinucleotide repeat disorder is depicted in FIG. 23. In general, the approach involves using prime editing in combination with an pegRNA that comprises a region that encodes a desired and healthy replacement trinucleotide repeat sequence that is intended to replace the endogenous diseased trinucleotide repeat sequence through the mechanism of the prime editing process. A schematic of an exemplary gRNA design for contracting trinucleotide repeat sequences and trinucleotide repeat contraction with prime editing is shown in FIG. 23.

### Prion Disease

[0982] Prime editing can also be used to prevent or halt the progression of prion disease through the installation of one or more protective mutations into prion proteins (PRNP) which become misfolded during the course of disease. Prion diseases or transmissible spongiform encephalopathies (TSEs) are a family of rare progressive neurodegenerative disorders that affect both humans and animals. They are distinguished by long incubation periods, characteristic spongiform changes associated with neuronal loss, and a failure to induce inflammatory response.

[0983] In humans, prion disease includes Creutzfeldt-Jakob Disease (CJD), Variant Creutzfeldt-Jakob Disease (vCJD), Gerstmann-Straussler-Scheinker Syndrome, Fatal Familial Insomnia, and Kuru. In animals, prion disease includes Bovine Spongiform Encephalopathy (BSE or “mad cow disease”), Chronic Wasting Disease (CWD), Scrapie, Transmissible Mink Encephalopathy, Feline Spongiform Encephalopathy, and Ungulate Spongiform Encephalopathy. Prime editing may be used to install protective point mutations into a prion protein in order to prevent or halt the progression of any one of these prion diseases.

[0984] Classic CJD is a human prion disease. It is a neurodegenerative disorder with characteristic clinical and diagnostic features. This disease is rapidly progressive and always fatal. Infection with this disease leads to death usually within 1 year of onset of illness. CJD is a rapidly progressive, invariably fatal neurodegenerative disorder believed to be caused by an abnormal isoform of a cellular glycoprotein known as the prion protein. CJD occurs worldwide and the estimated annual incidence in many countries, including the United States, has been reported to be about one case per million population. The vast majority of CJD patients usually die within 1 year of illness onset. CJD is classified as a transmissible spongiform encephalopathy (TSE) along with other prion diseases that occur in humans and animals. In about 85% of patients, CJD occurs as a sporadic disease with no recognizable pattern of transmission. A smaller proportion of patients (5 to 15%) develop CJD because of inherited mutations of the prion protein gene. These inherited forms include Gerstmann-Straussler-Scheinker syndrome and fatal familial insomnia. No treatment is currently known for CJD.

[0985] Variant Creutzfeldt-Jakob disease (vCJD) is a prion disease that was first described in 1996 in the United Kingdom. There is now strong scientific evidence that the agent responsible for the outbreak of prion disease in cows, bovine spongiform encephalopathy (BSE or ‘mad cow’ disease), is the same agent responsible for the outbreak of vCJD in humans. Variant CJD (vCJD) is not the same disease as classic CJD (often simply called CJD). It has different clinical and pathologic characteristics from classic CJD. Each disease also has a particular genetic profile of the prion protein gene. Both disorders are invariably fatal brain diseases with unusually long incubation periods measured in years, and are caused by an unconventional transmissible agent called a prion. No treatment is currently known for vCJD.

[0986] BSE (bovine spongiform encephalopathy or “mad cow disease”) is a progressive neurological disorder of cattle that results from infection by an unusual transmissible agent called a prion. The nature of the transmissible agent is not well understood. Currently, the most accepted theory is that the agent is a modified form of a normal protein known as prion protein. For reasons that are not yet understood, the normal prion protein changes into a pathogenic (harmful) form that then damages the central nervous system of cattle. There is increasing evidence that there are different strains of BSE: the typical or classic BSE strain responsible for the outbreak in the United Kingdom and two atypical strains (H and L strains). No treatment is currently known for BSE.

[0987] Chronic wasting disease (CWD) is a prion disease that affects deer, elk, reindeer, sika deer and moose. It has been found in some areas of North America, including Canada and the United States, Norway and South Korea. It may take over a year before an infected animal develops symptoms, which can include drastic weight loss (wasting), stumbling, listlessness and other neurologic symptoms. CWD can affect animals of all ages and some infected animals may die without ever developing the disease. CWD is fatal to animals and there are no treatments or vaccines.

[0988] The causative agents of TSEs are believed to be prions. The term “prions” refers to abnormal, pathogenic agents that are transmissible and are able to induce abnormal folding of specific normal cellular proteins called prion proteins that are found most abundantly in the brain. The functions of these normal prion proteins are still not completely understood. The abnormal folding of the prion proteins leads to brain damage and the characteristic signs and symptoms of the disease. Prion diseases are usually rapidly progressive and always fatal.

[0989] As used herein, the term “prion” shall mean an infectious particle known to cause diseases (spongiform encephalopathies) in humans and animals. The term “prion” is a contraction of the words “protein” and “infection” and the particles are comprised largely if not exclusively of PRNP^{Sc} molecules encoded by a PRNP gene which expresses PRNP^{C} which changes conformation to become PRNP^{Sc}. Prions are distinct from bacteria, viruses and viroids. Known prions include those which infect animals to cause scrapie, a transmissible, degenerative disease of the nervous system of sheep and goats as well as bovine spongiform encephalopathies (BSE) or mad cow disease and feline spongiform encephalopathies of cats. Four prion diseases, as discussed above, known to affect humans are (1) kuru, (2) Creutzfeldt-Jakob Disease (CJD), (3) Gerstmann-Strassler-Scheinker Disease (GSS), and (4) fatal familial insomnia (FFI). As used herein prion includes all forms of prions causing all or any of these diseases or others in any animals used—and in particular in humans and in domesticated farm animals.

[0990] In general, and without wishing to be bound by theory, prior diseases are caused by misfolding of prion proteins. Such diseases—often called deposition diseases—the misfolding of the prion proteins can be accounted for as follows. If A is the normally synthesized gene product that carries out an intended physiologic role in a monomeric or oligomeric state, A* is a conformationally activated form of A that is competent to undergo a dramatic conformational change, B is the conformationally altered state that prefers multimeric assemblies (i.e., the misfolded form which forms depositions) and B. is the multimeric material that is pathogenic and relatively difficult to recycle. For the prion diseases, PRNP^{C} and PRNP^{Sc} correspond to states A and Bₙ where A is largely helical and monomeric and Bₙ is β-rich and multimeric.

[0991] It is known that certain mutations in prion proteins can be associated with increased risk of prior disease. Conversely, certain mutations in prion proteins can be protective in nature. See Bagynszky et al., “Characterization of mutations in PRNP (prion) gene and their possible roles in neurodegenerative diseases,” Neuropsychiatr Dis Treat., 2018; 14: 2067-2085, the contents of which are incorporated herein by reference.

[0992] PRNP (NCBI RefSeq No. NP_000302.1 (SEQ ID NO: 396))—the human prion protein—is encoded by a 16 kb long gene, located on chromosome 20 (4686151-4701588). It contains two exons, and the exon 2 carries the open reading frame which encodes the 253 amino acid (AA) long PrP protein. Exon 1 is a noncoding exon, which may serve as transcriptional initiation site. The post-translational modifications result in the removal of the first 22 AA N-terminal fragment (NTF) and the last 23 AA C-terminal fragment (CTF). The NTF is cleaved after PrP transport to the endoplasmic reticulum (ER), while the CTF (glycosylphosphatidylinositol [GPI] signal peptide [GPI-SP]) is cleaved by the GPI anchor. GPI anchor could be involved in PrP protein transport. It may also play a role of attachment of prion protein into the outer surface of cell membrane. Normal PrP is composed of a long N-terminal loop (which contains the octapeptide repeat region), two short 3 sheets, three a helices, and a C-terminal region (which contains the GPI anchor). Cleavage of PrP results in a 208 AA long glyocoprotein, anchored in the cell membrane.

[0993] The 253 amino acid sequence of PRNP (NP 000302.1) is as follows:

(SEQ ID NO: 396)
MANLGCWMLVLFVATWSDLGLCKKRPKPGGWNTGGSRYPG
QGSPGGNRYPPQGGGGWGQPHGGGWGQPHGGGWGQPHGGG
WGQPHGGGWGQGGGTHSQWNKPSKPKTNMKHMAGAAAAGA
VVGGLGGYMLGSAMSRPIIHFGSDYEDRYYRENMHRYPNQ
VYYRPMDEYSNQNNFVHDCVNITIKQHTVTTTTKGENFTE
TDVKMMERVVEQMCITQYERESQAYYQRGSSMVLFSSPPV.

[0994] The 253 amino acid sequence of PRNP (NP_000302.1) is encoded by the following nucleotide sequence (NCBI Ref. Seq No. NM_000311.5, “Homo sapiens prion protein (PRNP), transcript variant 1, mRNA), is as follows:

(SEQ ID NO: 397)
GCGAACCTTGGCTGCTGGATGCTGGTTCTCTTTGTGGCCA
CATGGAGTGACCTGGGCCTCTGCAAGAAGCGCCCGAAGCC
TGGAGGATGGAACACTGGGGGCAGCCGATACCCGGGGCAG
GGCAGCCCTGGAGGCAACCGCTACCCACCTCAGGGCGGTG
GTGGCTGGGGGCAGCCTCATGGTGGTGGCTGGGGGCAGCC
TCATGGTGGTGGCTGGGGGCAGCCCCATGGTGGTGGCTGG
GGACAGCCTCATGGTGGTGGCTGGGGTCAAGGAGGTGGCA
CCCACAGTCAGTGGAACAAGCCGAGTAAGCCAAAAACCAA
CATGAAGCACATGGCTGGTGCTGCAGCAGCTGGGGCAGTG
GTGGGGGGCCTTGGCGGCTACATGCTGGGAAGTGCCATGA
GCAGGCCCATCATACATTTCGGCAGTGACTATGAGGACCG
TTACTATCGTGAAAACATGCACCGTTACCCCAACCAAGTG
TACTACAGGCCCATGGATGAGTACAGCAACCAGAACAACT
TTGTGCACGACTGCGTCAATATCACAATCAAGCAGCACAC
GGTCACCACAACCACCAAGGGGGAGAACTTCACCGAGACC
GACGTTAAGATGATGGAGCGCGTGGTTGAGCAGATGTGTA
TCACCCAGTACGAGAGGGAATCTCAGGCCTATTACCAGAG
AGGATCGAGCATGGTCCTCTTCTCCTCTCCACCTGTGATC
CTCCTGATCTCTTTCCTCATCTTCCTGATAGTGGGATGAG
GAAGGTCTTCCTGTTTTCACCATCTTTCTAATCTTTTTCC
AGCTTGAGGGAGGCGGTATCCACCTGCAGCCCTTTTAGTG
GTGGTGTCTCACTCTTTCTTCTCTCTTTGTCCCGGATAGG
CTAATCAATACCCTTGGCACTGATGGGCACTGGAAAACAT
AGAGTAGACCTGAGATGCTGGTCAAGCCCCCTTTGATTGA
GTTCATCATGAGCCGTTGCTAATGCCAGGCCAGTAAAAGT
ATAACAGCAAATAACCATTGGTTAATCTGGACTTATTTTT
GGACTTAGTGCAACAGGTTGAGGCTAAAACAAATCTCAGA
ACAGTCTGAAATACCTTTGCCTGGATACCTCTGGCTCCTT
CAGCAGCTAGAGCTCAGTATACTAATGCCCTATCTTAGTA
GAGATTTCATAGCTATTTAGAGATATTTTCCATTTTAAGA
AAACCCGACAACATTTCTGCCAGGTTTGTTAGGAGGCCAC
ATGATACTTATTCAAAAAAATCCTAGAGATTCTTAGCTCT
TGGGATGCAGGCTCAGCCCGCTGGAGCATGAGCTCTGTGT
GTACCGAGAACTGGGGTGATGTTTTACTTTTCACAGTATG
GGCTACACAGCAGCTGTTCAACAAGAGTAAATATTGTCAC
AACACTGAACCTCTGGCTAGAGGACATATTCACAGTGAAC
ATAACTGTAACATATATGAAAGGCTTCTGGGACTTGAAAT
CAAATGTTTGGGAATGGTGCCCTTGGAGGCAACCTCCCAT
TTTAGATGTTTAAAGGACCCTATATGTGGCATTCCTTTCT
TTAAACTATAGGTAATTAAGGCAGCTGAAAAGTAAATTGC
CTTCTAGACACTGAAGGCAAATCTCCTTTGTCCATTTACC
TGGAAACCAGAATGATTTTGACATACAGGAGAGCTGCAGT
TGTGAAAGCACCATCATCATAGAGGATGATGTAATTAAAA
AATGGTCAGTGTGCAAAGAAAAGAACTGCTTGCATTTCTT
TATTTCTGTCTCATAATTGTCAAAAACCAGAATTAGGTCA
AGTTCATAGTTTCTGTAATTGGCTTTTGAATCAAAGAATA
GGGAGACAATCTAAAAAATATCTTAGGTTGGAGATGACAG
AAATATGATTGATTTGAAGTGGAAAAAGAAATTCTGTTAA
TGTTAATTAAAGTAAAATTATTCCCTGAATTGTTTGATAT
TGTCACCTAGCAGATATGTATTACTTTTCTGCAATGTTAT
TATTGGCTTGCACTTTGTGAGTATTCTATGTAAAAATATA
TATGTATATAAAATATATATTGCATAGGACAGACTTAGGA
GTTTTGTTTAGAGCAGTTAACATCTGAAGTGTCTAATGCA
TTAACTTTTGTAAGGTACTGAATACTTAATATGTGGGAAA
CCCTTTTGCGTGGTCCTTAGGCTTACAATGTGCACTGAAT
CGTTTCATGTAAGAATCCAAAGTGGACACCATTAACAGGT
CTTTGAAATATGCATGTACTTTATATTTTCTATATTTGTA
ACTTTGCATGTTCTTGTTTTGTTATATAAAAAAATTGTAA
ATGTTTAATATCTGACTGAAATTAAACGAGCGAAGATGAG
CACCA

[0995] Mutation sites relative to PRNP (NP_000302.1) which are linked to CJD and FFI are reported are as follows. These mutations can be removed or installed using the prime editors disclosed herein.

| | AMINO ACID SEQUENCE OF MUTANT PRNP |
|---|---|
| | LINKED TO CJD PRION DISEASE (SEE |
| | TABLE 1 OF BAGYNSZKY ET AL., 2018) |
| | (RELATIVE TO SEQ ID NO: 396 OF |
| MUTATION | PRNP NP_000302.1) |
| D178N | MANLGCWMLVLFVATWSDLGLCKKRPKPGG |
| | WNTGGSRYPGQGSPGGNRYPPQGGGGWGQP |
| | HGGGWGQPHGGGWGQPHGGGWGQPHGGGWG |
| | QGGGTHSQWNKPSKPKTNMKHMAGAAAAGA |
| | VVGGLGGYMLGSAMSRPIIHFGSDYEDRYY |
| | RENMHRYPNQVYYRPMDEYSNQNNFVHNCV |
| | NITIKQHTVTTTTKGENFTETDVKMMERVV |
| | EQMCITQYERESQAYYQRGSSMVLFSSPPV |
| | (SEQ ID NO: 398) |
| T188K | MANLGCWMLVLFVATWSDLGLCKKRPKPGG |
| | WNTGGSRYPGQGSPGGNRYPPQGGGGWGQP |
| | HGGGWGQPHGGGWGQPHGGGWGQPHGGGWG |
| | QGGGTHSQWNKPSKPKTNMKHMAGAAAAGA |
| | VVGGLGGYMLGSAMSRPIIHFGSDYEDRYY |
| | RENMHRYPNQVYYRPMDEYSNQNNFVHDCV |
| | NITIKQHKVTTTTKGENFTETDVKMMERVV |
| | EQMCITQYERESQAYYQRGSSMVLFSSPPV |
| | (SEQ ID NO: 399) |
| E196K | MANLGCWMLVLFVATWSDLGLCKKRPKPGG |
| | WNTGGSRYPGQGSPGGNRYPPQGGGGWGQP |
| | HGGGWGQPHGGGWGQPHGGGWGQPHGGGWG |
| | QGGGTHSQWNKPSKPKTNMKHMAGAAAAGA |
| | VVGGLGGYMLGSAMSRPIIHFGSDYEDRYY |
| | RENMHRYPNQVYYRPMDEYSNQNNFVHDCV |
| | NITIKQHTVTTTTKGKNFTETDVKMMERVV |
| | EQMCITQYERESQAYYQRGSSMVLFSSPPV |
| | (SEQ ID NO: 400) |
| E196A | MANLGCWMLVLFVATWSDLGLCKKRPKPGG |
| | WNTGGSRYPGQGSPGGNRYPPQGGGGWGQP |
| | HGGGWGQPHGGGWGQPHGGGWGQPHGGGWG |
| | QGGGTHSQWNKPSKPKTNMKHMAGAAAAGA |
| | VVGGLGGYMLGSAMSRPIIHFGSDYEDRYY |
| | RENMHRYPNQVYYRPMDEYSNQNNFVHDCV |
| | NITIKQHTVTTTTKGANFTETDVKMMERVV |
| | EQMCITQYERESQAYYQRGSSMVLFSSPPV |
| | (SEQ ID NO: 401) |
| E200K | MANLGCWMLVLFVATWSDLGLCKKRPKPGG |
| | WNTGGSRYPGQGSPGGNRYPPQGGGGWGQP |
| | HGGGWGQPHGGGWGQPHGGGWGQPHGGGWG |
| | QGGGTHSQWNKPSKPKTNMKHMAGAAAAGA |
| | VVGGLGGYMLGSAMSRPIIHFGSDYEDRYY |
| | RENMHRYPNQVYYRPMDEYSNQNNFVHDCV |
| | NITIKQHTVTTTTKGENFTKTDVKMMERVV |
| | EQMCITQYERESQAYYQRGSSMVLFSSPPV |
| | (SEQ ID NO: 402) |
| E200G | MANLGCWMLVLFVATWSDLGLCKKRPKPGG |
| | WNTGGSRYPGQGSPGGNRYPPQGGGGWGQP |
| | HGGGWGQPHGGGWGQPHGGGWGQPHGGGWG |
| | QGGGTHSQWNKPSKPKTNMKHMAGAAAAGA |
| | VVGGLGGYMLGSAMSRPIIHFGSDYEDRYY |
| | RENMHRYPNQVYYRPMDEYSNQNNFVHDCV |
| | NITIKQHTVTTTTKGENFTGTDVKMMERVV |
| | EQMCITQYERESQAYYQRGSSMVLFSSPPV |
| | (SEQ ID NO: 403) |
| V203I | MANLGCWMLVLFVATWSDLGLCKKRPKPGG |
| | WNTGGSRYPGQGSPGGNRYPPQGGGGWGQP |
| | HGGGWGQPHGGGWGQPHGGGWGQPHGGGWG |
| | QGGGTHSQWNKPSKPKTNMKHMAGAAAAGA |
| | VVGGLGGYMLGSAMSRPIIHFGSDYEDRYY |
| | RENMHRYPNQVYYRPMDEYSNQNNFVHDCV |
| | NITIKQHTVTTTTKGENFTETDIKMMERVV |
| | EQMCITQYERESQAYYQRGSSMVLFSSPPV |
| | (SEQ ID NO: 404) |
| R208H | MANLGCWMLVLFVATWSDLGLCKKRPKPGG |
| | WNTGGSRYPGQGSPGGNRYPPQGGGGWGQP |
| | HGGGWGQPHGGGWGQPHGGGWGQPHGGGWG |
| | QGGGTHSQWNKPSKPKTNMKHMAGAAAAGA |
| | VVGGLGGYMLGSAMSRPIIHFGSDYEDRYY |
| | RENMHRYPNQVYYRPMDEYSNQNNFVHDCV |
| | NITIKQHTVTTTTKGENFTETDVKMMEHVV |
| | EQMCITQYERESQAYYQRGSSMVLFSSPPV |
| | (SEQ ID NO: 405) |
| V210I | MANLGCWMLVLFVATWSDLGLCKKRPKPGG |
| | WNTGGSRYPGQGSPGGNRYPPQGGGGWGQP |
| | HGGGWGQPHGGGWGQPHGGGWGQPHGGGWG |
| | QGGGTHSQWNKPSKPKTNMKHMAGAAAAGA |
| | VVGGLGGYMLGSAMSRPIIHFGSDYEDRYY |
| | RENMHRYPNQVYYRPMDEYSNQNNFVHDCV |
| | NITIKQHTVTTTTKGENFTETDVKMMERVI |
| | EQMCITQYERESQAYYQRGSSMVLFSSPPV |
| | (SEQ ID NO: 406) |
| E211Q | MANLGCWMLVLFVATWSDLGLCKKRPKPGG |
| | WNTGGSRYPGQGSPGGNRYPPQGGGGWGQP |
| | HGGGWGQPHGGGWGQPHGGGWGQPHGGGWG |
| | QGGGTHSQWNKPSKPKTNMKHMAGAAAAGA |
| | VVGGLGGYMLGSAMSRPIIHFGSDYEDRYY |
| | RENMHRYPNQVYYRPMDEYSNQNNFVHDCV |
| | NITIKQHTVTTTTKGENFTETDVKMMERVV |
| | QQMCITQYERESQAYYQRGSSMVLFSSPPV |
| | (SEQ ID NO: 407) |
| M232R | MANLGCWMLVLFVATWSDLGLCKKRPKPGG |
| | WNTGGSRYPGQGSPGGNRYPPQGGGGWGQP |
| | HGGGWGQPHGGGWGQPHGGGWGQPHGGGWG |
| | QGGGTHSQWNKPSKPKTNMKHMAGAAAAGA |
| | VVGGLGGYMLGSAMSRPIIHFGSDYEDRYY |
| | RENMHRYPNQVYYRPMDEYSNQNNFVHDCV |
| | NITIKQHTVTTTTKGENFTETDVKMMERVV |
| | EQMCITQYERESQAYYQRGSSRVLFSSPPV |
| | (SEQ ID NO: 408) |

[0996] Mutation sites relative to PRNP (NP_000302.1) (SEQ ID NO: 396) which are linked to GSS are reported, as follows:

| | AMINO ACID SEQUENCE OF MUTANT |
|---|---|
| | PRNP LINKED TO GSS PRION |
| | DISEASE (SEE TABLE 2 OF |
| | BAGYNSZKY ET AL., 2018) |
| | (RELATIVE TO SEQ ID NO: 396 |
| MUTATION | OF PRNP NP_000302.1) |
| P102L | MANLGCWMLVLFVATWSDLGLCKKRPKPGG |
| | WNTGGSRYPGQGSPGGNRYPPQGGGGWGQP |
| | HGGGWGQPHGGGWGQPHGGGWGQPHGGGWG |
| | QGGGTHSQWNKLSKPKTNMKHMAGAAAAGA |
| | VVGGLGGYMLGSAMSRPIIHFGSDYEDRYY |
| | RENMHRYPNQVYYRPMDEYSNQNNFVHDCV |
| | NITIKQHTVTTTTKGENFTETDVKMMERVV |
| | EQMCITQYERESQAYYQRGSSMVLFSSPPV |
| | (SEQ ID NO: 409) |
| P105L | MANLGCWMLVLFVATWSDLGLCKKRPKPGG |
| | WNTGGSRYPGQGSPGGNRYPPQGGGGWGQP |
| | HGGGWGQPHGGGWGQPHGGGWGQPHGGGWG |
| | QGGGTHSQWNKPSKLKTNMKHMAGAAAAGA |
| | VVGGLGGYMLGSAMSRPIIHFGSDYEDRYY |
| | RENMHRYPNQVYYRPMDEYSNQNNFVHDCV |
| | NITIKQHTVTTTTKGENFTETDVKMMERVV |
| | EQMCITQYERESQAYYQRGSSMVLFSSPPV |
| | (SEQ ID NO: 410) |
| A117V | MANLGCWMLVLFVATWSDLGLCKKRPKPGG |
| | WNTGGSRYPGQGSPGGNRYPPQGGGGWGQP |
| | HGGGWGQPHGGGWGQPHGGGWGQPHGGGWG |
| | QGGGTHSQWNKPSKPKTNMKHMAGAAVAGA |
| | VVGGLGGYMLGSAMSRPIIHFGSDYEDRYY |
| | RENMHRYPNQVYYRPMDEYSNQNNFVHDCV |
| | NITIKQHTVTTTTKGENFTETDVKMMERVV |
| | EQMCITQYERESQAYYQRGSSMVLFSSPPV |
| | (SEQ ID NO: 411) |
| G131V | MANLGCWMLVLFVATWSDLGLCKKRPKPGG |
| | WNTGGSRYPGQGSPGGNRYPPQGGGGWGQP |
| | HGGGWGQPHGGGWGQPHGGGWGQPHGGGWG |
| | QGGGTHSQWNKPSKPKTNMKHMAGAAAAGA |
| | VVGGLGGYMLVSAMSRPIIHFGSDYEDRYY |
| | RENMHRYPNQVYYRPMDEYSNQNNFVHDCV |
| | NITIKQHTVTTTTKGENFTETDVKMMERVV |
| | EQMCITQYERESQAYYQRGSSMVLFSSPPV |
| | (SEQ ID NO: 412) |
| V176G | MANLGCWMLVLFVATWSDLGLCKKRPKPGG |
| | WNTGGSRYPGQGSPGGNRYPPQGGGGWGQP |
| | HGGGWGQPHGGGWGQPHGGGWGQPHGGGWG |
| | QGGGTHSQWNKPSKPKTNMKHMAGAAAAGA |
| | VVGGLGGYMLGSAMSRPIIHFGSDYEDRYY |
| | RENMHRYPNQVYYRPMDEYSNQNNFGHDCV |
| | NITIKQHTVTTTTKGENFTETDVKMMERVV |
| | EQMCITQYERESQAYYQRGSSMVLFSSPPV |
| | (SEQ ID NO: 413) |
| H187R | MANLGCWMLVLFVATWSDLGLCKKRPKPGG |
| | WNTGGSRYPGQGSPGGNRYPPQGGGGWGQP |
| | HGGGWGQPHGGGWGQPHGGGWGQPHGGGWG |
| | QGGGTHSQWNKPSKPKTNMKHMAGAAAAGA |
| | VVGGLGGYMLGSAMSRPIIHFGSDYEDRYY |
| | RENMHRYPNQVYYRPMDEYSNQNNFVHDCV |
| | NITIKQRTVTTTTKGENFTETDVKMMERVV |
| | EQMCITQYERESQAYYQRGSSMVLFSSPPV |
| | (SEQ ID NO: 414) |
| | MANLGCWMLVLFVATWSDLGLCKKRPKPGG |
| | WNTGGSRYPGQGSPGGNRYPPQGGGGWGQP |
| | HGGGWGQPHGGGWGQPHGGGWGQPHGGGWG |
| | QGGGTHSQWNKPSKPKTNMKHMAGAAAAGA |
| | VVGGLGGYMLGSAMSRPIIHFGSDYEDRYY |
| | RENMHRYPNQVYYRPMDEYSNQNNFVHDCV |
| | NITIKQHTVTTTTKGENFTETDVKMMERVV |
| | EQMCITQYERESQAYYQRGSSMVLFSSPPV |
| | (SEQ ID NO: 396) |
| F198S | MANLGCWMLVLFVATWSDLGLCKKRPKPGG |
| | WNTGGSRYPGQGSPGGNRYPPQGGGGWGQP |
| | HGGGWGQPHGGGWGQPHGGGWGQPHGGGWG |
| | QGGGTHSQWNKPSKPKTNMKHMAGAAAAGA |
| | VVGGLGGYMLGSAMSRPIIHFGSDYEDRYY |
| | RENMHRYPNQVYYRPMDEYSNQNNFVHDCV |
| | NITIKQHTVTTTTKGENSTETDVKMMERVV |
| | EQMCITQYERESQAYYQRGSSMVLFSSPPV |
| | (SEQ ID NO: 415) |
| D202N | MANLGCWMLVLFVATWSDLGLCKKRPKPGG |
| | WNTGGSRYPGQGSPGGNRYPPQGGGGWGQP |
| | HGGGWGQPHGGGWGQPHGGGWGQPHGGGWG |
| | QGGGTHSQWNKPSKPKTNMKHMAGAAAAGA |
| | VVGGLGGYMLGSAMSRPIIHFGSDYEDRYY |
| | RENMHRYPNQVYYRPMDEYSNQNNFVHDCV |
| | NITIKQHTVTTTTKGENFTETNVKMMERVV |
| | EQMCITQYERESQAYYQRGSSMVLFSSPPV |
| | (SEQ ID NO: 416) |
| Q212P | MANLGCWMLVLFVATWSDLGLCKKRPKPGG |
| | WNTGGSRYPGQGSPGGNRYPPQGGGGWGQP |
| | HGGGWGQPHGGGWGQPHGGGWGQPHGGGWG |
| | QGGGTHSQWNKPSKPKTNMKHMAGAAAAGA |
| | VVGGLGGYMLGSAMSRPIIHFGSDYEDRYY |
| | RENMHRYPNQVYYRPMDEYSNQNNFVHDCV |
| | NITIKQHTVTTTTKGENFTETDVKMMERVV |
| | EPMCITQYERESQAYYQRGSSMVLFSSPPV |
| | (SEQ ID NO: 417) |
| Q217R | MANLGCWMLVLFVATWSDLGLCKKRPKPGG |
| | WNTGGSRYPGQGSPGGNRYPPQGGGGWGQP |
| | HGGGWGQPHGGGWGQPHGGGWGQPHGGGWG |
| | QGGGTHSQWNKPSKPKTNMKHMAGAAAAGA |
| | VVGGLGGYMLGSAMSRPIIHFGSDYEDRYY |
| | RENMHRYPNQVYYRPMDEYSNQNNFVHDCV |
| | NITIKQHTVTTTTKGENFTETDVKMMERVV |
| | EQMCITRYERESQAYYQRGSSMVLFSSPPV |
| | (SEQ ID NO: 418) |
| M232T | MANLGCWMLVLFVATWSDLGLCKKRPKPGG |
| | WNTGGSRYPGQGSPGGNRYPPQGGGGWGQP |
| | HGGGWGQPHGGGWGQPHGGGWGQPHGGGWG |
| | QGGGTHSQWNKPSKPKTNMKHMAGAAAAGA |
| | VVGGLGGYMLGSAMSRPIIHFGSDYEDRYY |
| | RENMHRYPNQVYYRPMDEYSNQNNFVHDCV |
| | NITIKQHTVTTTTKGENFTETDVKMMERVV |
| | EQMCITQYERESQAYYQRGSSTVLFSSPPV |
| | (SEQ ID NO: 419) |

[0997] Mutation sites relative to PRNP (NP_000302.1) (SEQ ID NO: 396) which are linked to a possible protective nature against prion disease, as follows:

| | AMINO ACID SEQUENCE OF MUTANT PRNP |
|---|---|
| | LINKED TO A PROTECTIVENATURE AGAINST |
| | PRION DISEASE (SEE TABLE 4 OF |
| | BAGYNSZKY ET AL., 2018) (RELATIVE |
| | TO SEQ ID NO: 396 OF |
| MUTATION | PRNP NP_000302.1) |
| G127S | MANLGCWMLVLFVATWSDLGLCKKRPKPGG |
| | WNTGGSRYPGQGSPGGNRYPPQGGGGWGQP |
| | HGGGWGQPHGGGWGQPHGGGWGQPHGGGWG |
| | QGGGTHSQWNKPSKPKTNMKHMAGAAAAGA |
| | VVGGLGSYMLGSAMSRPIIHFGSDYEDRYY |
| | RENMHRYPNQVYYRPMDEYSNQNNFVHDCV |
| | NITIKQHTVTTTTKGENFTETDVKMMERVV |
| | EQMCITQYERESQAYYQRGSSMVLFSSPPV |
| | (SEQ ID NO: 420) |
| G127V | MANLGCWMLVLFVATWSDLGLCKKRPKPGG |
| | WNTGGSRYPGQGSPGGNRYPPQGGGGWGQP |
| | HGGGWGQPHGGGWGQPHGGGWGQPHGGGWG |
| | QGGGTHSQWNKPSKPKTNMKHMAGAAAAGA |
| | VVGGLGVYMLGSAMSRPIIHFGSDYEDRYY |
| | RENMHRYPNQVYYRPMDEYSNQNNFVHDCV |
| | NITIKQHTVTTTTKGENFTETDVKMMERVV |
| | EQMCITQYERESQAYYQRGSSMVLFSSPPV |
| | (SEQ ID NO: 421) |
| M129V | MANLGCWMLVLFVATWSDLGLCKKRPKPGG |
| | WNTGGSRYPGQGSPGGNRYPPQGGGGWGQP |
| | HGGGWGQPHGGGWGQPHGGGWGQPHGGGWG |
| | QGGGTHSQWNKPSKPKTNMKHMAGAAAAGA |
| | VVGGLGGYVLGSAMSRPIIHFGSDYEDRYY |
| | RENMHRYPNQVYYRPMDEYSNQNNFVHDCV |
| | NITIKQHTVTTTTKGENFTETDVKMMERVV |
| | EQMCITQYERESQAYYQRGSSMVLFSSPPV |
| | (SEQ ID NO: 422) |
| D167G | MANLGCWMLVLFVATWSDLGLCKKRPKPGG |
| | WNTGGSRYPGQGSPGGNRYPPQGGGGWGQP |
| | HGGGWGQPHGGGWGQPHGGGWGQPHGGGWG |
| | QGGGTHSQWNKPSKPKTNMKHMAGAAAAGA |
| | VVGGLGGYMLGSAMSRPIIHFGSDYEDRYY |
| | RENMHRYPNQVYYRPMGEYSNQNNFVHDCV |
| | NITIKQHTVTTTTKGENFTETDVKMMERVV |
| | EQMCITQYERESQAYYQRGSSMVLFSSPPV |
| | (SEQ ID NO: 423) |
| D167N | MANLGCWMLVLFVATWSDLGLCKKRPKPGG |
| | WNTGGSRYPGQGSPGGNRYPPQGGGGWGQP |
| | HGGGWGQPHGGGWGQPHGGGWGQPHGGGWG |
| | QGGGTHSQWNKPSKPKTNMKHMAGAAAAGA |
| | VVGGLGGYMLGSAMSRPIIHFGSDYEDRYY |
| | RENMHRYPNQVYYRPMNEYSNQNNFVHDCV |
| | NITIKQHTVTTTTKGENFTETDVKMMERVV |
| | EQMCITQYERESQAYYQRGSSMVLFSSPPV |
| | (SEQ ID NO: 424) |
| N171S | MANLGCWMLVLFVATWSDLGLCKKRPKPGG |
| | WNTGGSRYPGQGSPGGNRYPPQGGGGWGQP |
| | HGGGWGQPHGGGWGQPHGGGWGQPHGGGWG |
| | QGGGTHSQWNKPSKPKTNMKHMAGAAAAGA |
| | VVGGLGGYMLGSAMSRPIIHFGSDYEDRYY |
| | RENMHRYPNQVYYRPMDEYSSQNNFVHDCV |
| | NITIKQHTVTTTTKGENFTETDVKMMERVV |
| | EQMCITQYERESQAYYQRGSSMVLFSSPPV |
| | (SEQ ID NO: 425) |
| E219K | MANLGCWMLVLFVATWSDLGLCKKRPKPGG |
| | WNTGGSRYPGQGSPGGNRYPPQGGGGWGQP |
| | HGGGWGQPHGGGWGQPHGGGWGQPHGGGWG |
| | QGGGTHSQWNKPSKPKTNMKHMAGAAAAGA |
| | VVGGLGGYMLGSAMSRPIIHFGSDYEDRYY |
| | RENMHRYPNQVYYRPMDEYSNQNNFVHDCV |
| | NITIKQHTVTTTTKGENFTETDVKMMERVV |
| | EQMCITQYKRESQAYYQRGSSMVLFSSPPV |
| | (SEQ ID NO: 426) |
| P238S | MANLGCWMLVLFVATWSDLGLCKKRPKPGG |
| | WNTGGSRYPGQGSPGGNRYPPQGGGGWGQP |
| | HGGGWGQPHGGGWGQPHGGGWGQPHGGGWG |
| | QGGGTHSQWNKPSKPKTNMKHMAGAAAAGA |
| | VVGGLGGYMLGSAMSRPIIHFGSDYEDRYY |
| | RENMHRYPNQVYYRPMDEYSNQNNFVHDCV |
| | NITIKQHTVTTTTKGENFTETDVKMMERVV |
| | EQMCITQYERESQAYYQRGSSMVLFSSSPV |
| | (SEQ ID NO: 427) |

[0998] Thus, in various embodiments, prime editing may be used to remove a mutation in PRNP that is linked to prion disease or install a mutation in PRNP that is considered to be protective against prion disease. For example, prime editing may be use to remove or restore a D178N, V1801, T188K, E196K, E196A, E200K, E200G, V203I, R208H, V210I, E211Q, I215V, or M232R mutation in the PRNP protein (relative to PRNP of NP_000302.1) (SEQ ID NO: 396). In other embodiments, prime editing may be use to remove or restore a P102L, P105L, A117V, G131V, V176G, H187R, F198S, D202N, Q212P, Q217R, or M232T mutation in the PRNP protein (relative to PRNP of NP_000302.1) (SEQ ID NO: 396). By removing or correcting for the presence of such mutations in PRNP using prime editing, the risk of prion disease may be reduced or eliminated.

[0999] In other embodiments, prime editing may be used to install a protective mutation in PRNP that is linked to a protective effect against one or more prion diseases. For example, prime editing may be used to install a G127S, G127V, M129V, D167G, D167N, N171S, E219K, or P238S protective mutation in PRNP (relative to PRNP of NP_000302.1) (SEQ ID NO: 396). In still other embodiments, the protective mutation may be any alternate amino acid installed at G127, G127, M129, D167, D167, N171, E219, or P238 in PRNP (relative to PRNP of NP_000302.1) (SEQ ID NO: 396).

[1000] In particular embodiments, prime editing may be used to install a G127V protective mutation in PRNP, as illustrated in FIG. 27 and discussed in Example 5.

[1001] In another embodiment, prime editing may be used to install an E219K protective mutation in PRNP.

[1002] The PRNP protein and the protective mutation site are conserved in mammals, so in addition to treating human disease it could also be used to generate cows and sheep that are immune to prion disease, or even help cure wild populations of animals that are suffering from prion disease. Prime editing can be used to achieve ˜25% installation of a naturally occurring protective allele in human cells, and mouse experiments indicate that this level of installation is sufficient to cause immunity from prion diseases. This method is the first and potentially only current way to install this allele with such high efficiency in most cell types. Another possible strategy for treatment is to use prime editing to reduce or eliminate the expression of PRNP by installing an early stop codon in the gene.

[1003] Using the principles described herein for pegRNA design, appropriate pegRNAs may be designed for installing desired protective mutations, or for removing prion disease-associated mutations from PRNP. For example, the below list of pegRNAs can be used to install the G127V protective allele and the E219K protective allele in human PRNP, as well as the G127V protective allele in PRNP of various animals.

### [10] Pharmaceutical Compositions

[1004] Other aspects of the present disclosure relate to pharmaceutical compositions comprising any of the various components of the prime editing system described herein (e.g., including, but not limited to, the napDNAbps, reverse transcriptases, fusion proteins (e.g., comprising napDNAbps and reverse transcriptases), pegRNAs, and complexes comprising fusion proteins and pegRNAs, as well as accessory elements, such as second strand nicking components and 5′ endogenous DNA flap removal endonucleases for helping to drive the prime editing process towards the edited product formation).

[1005] The term “pharmaceutical composition”, as used herein, refers to a composition formulated for pharmaceutical use. In some embodiments, the pharmaceutical composition further comprises a pharmaceutically acceptable carrier. In some embodiments, the pharmaceutical composition comprises additional agents (e.g. for specific delivery, increasing half-life, or other therapeutic compounds).

[1006] As used here, the term “pharmaceutically-acceptable carrier” means a pharmaceutically-acceptable material, composition or vehicle, such as a liquid or solid filler, diluent, excipient, manufacturing aid (e.g., lubricant, talc magnesium, calcium or zinc stearate, or steric acid), or solvent encapsulating material, involved in carrying or transporting the compound from one site (e.g., the delivery site) of the body, to another site (e.g., organ, tissue or portion of the body). A pharmaceutically acceptable carrier is “acceptable” in the sense of being compatible with the other ingredients of the formulation and not injurious to the tissue of the subject (e.g., physiologically compatible, sterile, physiologic pH, etc.). Some examples of materials which can serve as pharmaceutically-acceptable carriers include: (1) sugars, such as lactose, glucose and sucrose; (2) starches, such as corn starch and potato starch; (3) cellulose, and its derivatives, such as sodium carboxymethyl cellulose, methylcellulose, ethyl cellulose, microcrystalline cellulose and cellulose acetate; (4) powdered tragacanth; (5) malt; (6) gelatin; (7) lubricating agents, such as magnesium stearate, sodium lauryl sulfate and talc; (8) excipients, such as cocoa butter and suppository waxes; (9) oils, such as peanut oil, cottonseed oil, safflower oil, sesame oil, olive oil, corn oil and soybean oil; (10) glycols, such as propylene glycol; (11) polyols, such as glycerin, sorbitol, mannitol and polyethylene glycol (PEG); (12) esters, such as ethyl oleate and ethyl laurate; (13) agar; (14) buffering agents, such as magnesium hydroxide and aluminum hydroxide; (15) alginic acid; (16) pyrogen-free water; (17) isotonic saline; (18) Ringer's solution; (19) ethyl alcohol; (20) pH buffered solutions; (21) polyesters, polycarbonates and/or polyanhydrides; (22) bulking agents, such as polypeptides and amino acids (23) serum component, such as serum albumin, HDL and LDL; (22) C2-C12 alcohols, such as ethanol; and (23) other non-toxic compatible substances employed in pharmaceutical formulations. Wetting agents, coloring agents, release agents, coating agents, sweetening agents, flavoring agents, perfuming agents, preservative and antioxidants can also be present in the formulation. The terms such as “excipient”, “carrier”, “pharmaceutically acceptable carrier” or the like are used interchangeably herein.

[1007] In some embodiments, the pharmaceutical composition is formulated for delivery to a subject, e.g., for gene editing. Suitable routes of administrating the pharmaceutical composition described herein include, without limitation: topical, subcutaneous, transdermal, intradermal, intralesional, intraarticular, intraperitoneal, intravesical, transmucosal, gingival, intradental, intracochlear, transtympanic, intraorgan, epidural, intrathecal, intramuscular, intravenous, intravascular, intraosseus, periocular, intratumoral, intracerebral, and intracerebroventricular administration.

[1008] In some embodiments, the pharmaceutical composition described herein is administered locally to a diseased site (e.g., tumor site). In some embodiments, the pharmaceutical composition described herein is administered to a subject by injection, by means of a catheter, by means of a suppository, or by means of an implant, the implant being of a porous, non-porous, or gelatinous material, including a membrane, such as a sialastic membrane, or a fiber.

[1009] In other embodiments, the pharmaceutical composition described herein is delivered in a controlled release system. In one embodiment, a pump may be used (see, e.g., Langer, 1990, Science 249:1527-1533; Sefton, 1989, CRC Crit. Ref. Biomed. Eng. 14:201; Buchwald et al., 1980, Surgery 88:507; Saudek et al., 1989, N. Engl. J. Med. 321:574). In another embodiment, polymeric materials can be used. (See, e.g., Medical Applications of Controlled Release (Langer and Wise eds., CRC Press, Boca Raton, Fla., 1974); Controlled Drug Bioavailability, Drug Product Design and Performance (Smolen and Ball eds., Wiley, New York, 1984); Ranger and Peppas, 1983, Macromol. Sci. Rev. Macromol. Chem. 23:61. See also Levy et al., 1985, Science 228:190; During et al., 1989, Ann. Neurol. 25:351; Howard et al., 1989, J. Neurosurg. 71:105). Other controlled release systems are discussed, for example, in Langer, supra.

[1010] In some embodiments, the pharmaceutical composition is formulated in accordance with routine procedures as a composition adapted for intravenous or subcutaneous administration to a subject, e.g., a human. In some embodiments, pharmaceutical composition for administration by injection are solutions in sterile isotonic aqueous buffer. Where necessary, the pharmaceutical can also include a solubilizing agent and a local anesthetic such as lignocaine to ease pain at the site of the injection. Generally, the ingredients are supplied either separately or mixed together in unit dosage form, for example, as a dry lyophilized powder or water free concentrate in a hermetically sealed container such as an ampoule or sachette indicating the quantity of active agent. Where the pharmaceutical is to be administered by infusion, it can be dispensed with an infusion bottle containing sterile pharmaceutical grade water or saline. Where the pharmaceutical composition is administered by injection, an ampoule of sterile water for injection or saline can be provided so that the ingredients can be mixed prior to administration.

[1011] A pharmaceutical composition for systemic administration may be a liquid, e.g., sterile saline, lactated Ringer's or Hank's solution. In addition, the pharmaceutical composition can be in solid forms and re-dissolved or suspended immediately prior to use. Lyophilized forms are also contemplated.

[1012] The pharmaceutical composition can be contained within a lipid particle or vesicle, such as a liposome or microcrystal, which is also suitable for parenteral administration. The particles can be of any suitable structure, such as unilamellar or plurilamellar, so long as compositions are contained therein. Compounds can be entrapped in “stabilized plasmid-lipid particles” (SPLP) containing the fusogenic lipid dioleoylphosphatidylethanolamine (DOPE), low levels (5-10 mol %) of cationic lipid, and stabilized by a polyethyleneglycol (PEG) coating (Zhang Y. P. et al., Gene Ther. 1999, 6:1438-47). Positively charged lipids such as N-[1-(2,3-dioleoyloxi)propyl]-N,N,N-trimethyl-amoniummethylsulfate, or “DOTAP,” are particularly preferred for such particles and vesicles. The preparation of such lipid particles is well known. See, e.g., U.S. Pat. Nos. 4,880,635; 4,906,477; 4,911,928; 4,917,951; 4,920,016; and 4,921,757; each of which is incorporated herein by reference.

[1013] The pharmaceutical composition described herein may be administered or packaged as a unit dose, for example. The term “unit dose” when used in reference to a pharmaceutical composition of the present disclosure refers to physically discrete units suitable as unitary dosage for the subject, each unit containing a predetermined quantity of active material calculated to produce the desired therapeutic effect in association with the required diluent; i.e., carrier, or vehicle.

[1014] Further, the pharmaceutical composition can be provided as a pharmaceutical kit comprising (a) a container containing a compound of the invention in lyophilized form and (b) a second container containing a pharmaceutically acceptable diluent (e.g., sterile water) for injection. The pharmaceutically acceptable diluent can be used for reconstitution or dilution of the lyophilized compound of the invention. Optionally associated with such container(s) can be a notice in the form prescribed by a governmental agency regulating the manufacture, use or sale of pharmaceuticals or biological products, which notice reflects approval by the agency of manufacture, use or sale for human administration.

[1015] In another aspect, an article of manufacture containing materials useful for the treatment of the diseases described above is included. In some embodiments, the article of manufacture comprises a container and a label. Suitable containers include, for example, bottles, vials, syringes, and test tubes. The containers may be formed from a variety of materials such as glass or plastic. In some embodiments, the container holds a composition that is effective for treating a disease described herein and may have a sterile access port. For example, the container may be an intravenous solution bag or a vial having a stopper pierce-able by a hypodermic injection needle. The active agent in the composition is a compound of the invention. In some embodiments, the label on or associated with the container indicates that the composition is used for treating the disease of choice. The article of manufacture may further comprise a second container comprising a pharmaceutically-acceptable buffer, such as phosphate-buffered saline, Ringer's solution, or dextrose solution. It may further include other materials desirable from a commercial and user standpoint, including other buffers, diluents, filters, needles, syringes, and package inserts with instructions for use.

### Kits, Cells, Vectors, and Delivery

### Kits

[1016] The compositions of the present disclosure may be assembled into kits. In some embodiments, the kit comprises nucleic acid vectors for the expression of the prime editors described herein. In other embodiments, the kit further comprises appropriate guide nucleotide sequences (e.g., pegRNAs and second-site gRNAs) or nucleic acid vectors for the expression of such guide nucleotide sequences, to target the Cas9 protein or prime editor to the desired target sequence.

[1017] The kit described herein may include one or more containers housing components for performing the methods described herein and optionally instructions for use. Any of the kit described herein may further comprise components needed for performing the assay methods. Each component of the kits, where applicable, may be provided in liquid form (e.g., in solution) or in solid form, (e.g., a dry powder). In certain cases, some of the components may be reconstitutable or otherwise processible (e.g., to an active form), for example, by the addition of a suitable solvent or other species (for example, water), which may or may not be provided with the kit.

[1018] In some embodiments, the kits may optionally include instructions and/or promotion for use of the components provided. As used herein, “instructions” can define a component of instruction and/or promotion, and typically involve written instructions on or associated with packaging of the disclosure. Instructions also can include any oral or electronic instructions provided in any manner such that a user will clearly recognize that the instructions are to be associated with the kit, for example, audiovisual (e.g., videotape, DVD, etc.), Internet, and/or web-based communications, etc. The written instructions may be in a form prescribed by a governmental agency regulating the manufacture, use, or sale of pharmaceuticals or biological products, which can also reflect approval by the agency of manufacture, use or sale for animal administration. As used herein, “promoted” includes all methods of doing business including methods of education, hospital and other clinical instruction, scientific inquiry, drug discovery or development, academic research, pharmaceutical industry activity including pharmaceutical sales, and any advertising or other promotional activity including written, oral and electronic communication of any form, associated with the disclosure. Additionally, the kits may include other components depending on the specific application, as described herein.

[1019] The kits may contain any one or more of the components described herein in one or more containers. The components may be prepared sterilely, packaged in a syringe and shipped refrigerated. Alternatively it may be housed in a vial or other container for storage. A second container may have other components prepared sterilely. Alternatively the kits may include the active agents premixed and shipped in a vial, tube, or other container.

[1020] The kits may have a variety of forms, such as a blister pouch, a shrink wrapped pouch, a vacuum sealable pouch, a sealable thermoformed tray, or a similar pouch or tray form, with the accessories loosely packed within the pouch, one or more tubes, containers, a box or a bag. The kits may be sterilized after the accessories are added, thereby allowing the individual accessories in the container to be otherwise unwrapped. The kits can be sterilized using any appropriate sterilization techniques, such as radiation sterilization, heat sterilization, or other sterilization methods known in the art. The kits may also include other components, depending on the specific application, for example, containers, cell media, salts, buffers, reagents, syringes, needles, a fabric, such as gauze, for applying or removing a disinfecting agent, disposable gloves, a support for the agents prior to administration, etc. Some aspects of this disclosure provide kits comprising a nucleic acid construct comprising a nucleotide sequence encoding the various components of the prime editing system described herein (e.g., including, but not limited to, the napDNAbps, reverse transcriptases, polymerases, fusion proteins (e.g., comprising napDNAbps and reverse transcriptases (or more broadly, polymerases), pegRNAs, and complexes comprising fusion proteins and pegRNAs, as well as accessory elements, such as second strand nicking components (e.g., second strand nicking gRNA) and 5′ endogenous DNA flap removal endonucleases for helping to drive the prime editing process towards the edited product formation). In some embodiments, the nucleotide sequence(s) comprises a heterologous promoter (or more than a single promoter) that drives expression of the prime editing system components.

[1021] Other aspects of this disclosure provide kits comprising one or more nucleic acid constructs encoding the various components of the prime editing system described herein, e.g., the comprising a nucleotide sequence encoding the components of the prime editing system capable of modifying a target DNA sequence. In some embodiments, the nucleotide sequence comprises a heterologous promoter that drives expression of the prime editing system components.

[1022] Some aspects of this disclosure provides kits comprising a nucleic acid construct, comprising (a) a nucleotide sequence encoding a napDNAbp (e.g., a Cas9 domain) fused to a polymerase, such as a reverse transcriptase and (b) a heterologous promoter that drives expression of the sequence of (a).

### Cells

[1023] Cells that may contain any of the compositions described herein include prokaryotic cells and eukaryotic cells. The methods described herein are used to deliver a Cas9 protein or a prime editor into a eukaryotic cell (e.g., a mammalian cell, such as a human cell). In some embodiments, the cell is in vitro (e.g., cultured cell. In some embodiments, the cell is in vivo (e.g., in a subject such as a human subject). In some embodiments, the cell is ex vivo (e.g., isolated from a subject and may be administered back to the same or a different subject).

[1024] Mammalian cells of the present disclosure include human cells, primate cells (e.g., vero cells), rat cells (e.g., GH3 cells, OC23 cells) or mouse cells (e.g., MC3T3 cells). There are a variety of human cell lines, including, without limitation, human embryonic kidney (HEK) cells, HeLa cells, cancer cells from the National Cancer Institute's 60 cancer cell lines (NCI60), DU145 (prostate cancer) cells, Lncap (prostate cancer) cells, MCF-7 (breast cancer) cells, MDA-MB-438 (breast cancer) cells, PC3 (prostate cancer) cells, T47D (breast cancer) cells, THP-1 (acute myeloid leukemia) cells, U87 (glioblastoma) cells, SHSY5Y human neuroblastoma cells (cloned from a myeloma) and Saos-2 (bone cancer) cells. In some embodiments, rAAV vectors are delivered into human embryonic kidney (HEK) cells (e.g., HEK 293 or HEK 293T cells). In some embodiments, rAAV vectors are delivered into stem cells (e.g., human stem cells) such as, for example, pluripotent stem cells (e.g., human pluripotent stem cells including human induced pluripotent stem cells (hiPSCs)). A stem cell refers to a cell with the ability to divide for indefinite periods in culture and to give rise to specialized cells. A pluripotent stem cell refers to a type of stem cell that is capable of differentiating into all tissues of an organism, but not alone capable of sustaining full organismal development. A human induced pluripotent stem cell refers to a somatic (e.g., mature or adult) cell that has been reprogrammed to an embryonic stem cell-like state by being forced to express genes and factors important for maintaining the defining properties of embryonic stem cells (see, e.g., Takahashi and Yamanaka, Cell 126 (4): 663-76, 2006, incorporated by reference herein). Human induced pluripotent stem cell cells express stem cell markers and are capable of generating cells characteristic of all three germ layers (ectoderm, endoderm, mesoderm).

[1025] Additional non-limiting examples of cell lines that may be used in accordance with the present disclosure include 293-T, 293-T, 3T3, 4T1, 721, 9L, A-549, A172, A20, A253, A2780, A2780ADR, A2780cis, A431, ALC, B16, B35, BCP-1, BEAS-2B, bEnd.3, BHK-21, BR 293, BxPC3, C2C12, C3H-1OT1/2, C6, C6/36, Cal-27, CGR8, CHO, CML T1, CMT, COR-L23, COR-L23/5010, COR-L23/CPR, COR-L23/R23, COS-7, COV-434, CT26, D17, DH82, DU145, DuCaP, E14Tg2a, EL4, EM2, EM3, EMT6/AR1, EMT6/AR10.0, FM3, H1299, H69, HB54, HB55, HCA2, Hepalclc7, High Five cells, HL-60, HMEC, HT-29, HUVEC, J558L cells, Jurkat, JY cells, K562 cells, KCL22, KG1, Ku812, KYO1, LNCap, Ma-Mel 1, 2, 3 . . . 48, MC-38, MCF-10A, MCF-7, MDA-MB-231, MDA-MB-435, MDA-MB-468, MDCK II, MG63, MONO-MAC 6, MOR/0.2R, MRC5, MTD-1A, MyEnd, NALM-1, NCI-H69/CPR, NCI-H69/LX10, NCI-H69/LX20, NCI-H69/LX4, NIH-3T3, NW-145, OPCN/OPCT Peer, PNT-1A/PNT 2, PTK2, Raji, RBL cells, RenCa, RIN-5F, RMA/RMAS, S2, Saos-2 cells, Sf21, Sf9, SiHa, SKBR3, SKOV-3, T-47D, T2, T84, THP1, U373, U87, U937, VCaP, WM39, WT-49, X63, YAC-1 and YAR cells.

[1026] Some aspects of this disclosure provide cells comprising any of the constructs disclosed herein. In some embodiments, a host cell is transiently or non-transiently transfected with one or more vectors described herein. In some embodiments, a cell is transfected as it naturally occurs in a subject. In some embodiments, a cell that is transfected is taken from a subject. In some embodiments, the cell is derived from cells taken from a subject, such as a cell line. A wide variety of cell lines for tissue culture are known in the art. Examples of cell lines include, but are not limited to, C8161, CCRF-CEM, MOLT, mIMCD-3, NHDF, HeLa-S3, Huh1, Huh4, Huh7, HUVEC, HASMC, HEKn, HEKa, MiaPaCell, Panc1, PC-3, TF1, CTLL-2, C1R, Rat6, CV1, RPTE, A10, T24, J82, A375, ARH-77, Calul, SW480, SW620, SKOV3, SK-UT, CaCo2, P388D1, SEM-K2, WEHI-231, HB56, TIB55, Jurkat, J45.01, LRMB, Bcl-1, BC-3, IC21, DLD2, Raw264.7, NRK, NRK-52E, MRC5, MEF, Hep G2, HeLa B, HeLa T4, COS, COS-1, COS-6, COS-M6A, BS-C-1 monkey kidney epithelial, BALB/3T3 mouse embryo fibroblast, 3T3 Swiss, 3T3-L1, 132-d5 human fetal fibroblasts; 10.1 mouse fibroblasts, 293-T, 3T3, 721, 9L, A2780, A2780ADR, A2780cis, A 172, A20, A253, A431, A-549, ALC, B16, B35, BCP-1 cells, BEAS-2B, bEnd.3, BHK-21, BR 293. BxPC3. C3H-10T1/2, C6/36, Cal-27, CHO, CHO-7, CHO-IR, CHO-K1, CHO-K2, CHO-T, CHO Dhfr −/−, COR-L23, COR-L23/CPR, COR-L23/5010, COR-L23/R23, COS-7, COV-434, CML T1, CMT, CT26, D17, DH82, DU145, DuCaP, EL4, EM2, EM3, EMT6/AR1, EMT6/AR10.0, FM3, H1299, H69, HB54, HB55, HCA2, HEK-293, HeLa, Hepalclc7, HL-60, HMEC, HT-29, Jurkat, JY cells, K562 cells, Ku812, KCL22, KG1, KYO1, LNCap, Ma-Mel 1-48, MC-38, MCF-7, MCF-10A, MDA-MB-231, MDA-MB-468, MDA-MB-435, MDCK II, MDCK 11, MOR/0.2R, MONO-MAC 6, MTD-1A, MyEnd, NCI-H69/CPR, NCI-H69/LX10, NCI-H69/LX20, NCI-H69/LX4, NIH-3T3, NALM-1, NW-145, OPCN/OPCT cell lines, Peer, PNT-1A/PNT 2, RenCa, RIN-5F, RMA/RMAS, Saos-2 cells, Sf-9, SkBr3, T2, T-47D, T84, THP1 cell line, U373, U87, U937, VCaP, Vero cells, WM39, WT-49, X63, YAC-1, YAR, and transgenic varieties thereof.

[1027] Cell lines are available from a variety of sources known to those with skill in the art (see, e.g., the American Type Culture Collection (ATCC) (Manassas, Va.)). In some embodiments, a cell transfected with one or more vectors described herein is used to establish a new cell line comprising one or more vector-derived sequences. In some embodiments, a cell transiently transfected with the components of a CRISPR system as described herein (such as by transient transfection of one or more vectors, or transfection with RNA), and modified through the activity of a CRISPR complex, is used to establish a new cell line comprising cells containing the modification but lacking any other exogenous sequence. In some embodiments, cells transiently or non-transiently transfected with one or more vectors described herein, or cell lines derived from such cells are used in assessing one or more test compounds.

### Vectors

[1028] Some aspects of the present disclosure relate to using recombinant virus vectors (e.g., adeno-associated virus vectors, adenovirus vectors, or herpes simplex virus vectors) for the delivery of the prime editors or components thereof described herein, e.g., the split Cas9 protein or a split nucleobase prime editors, into a cell. In the case of a split-PE approach, the N-terminal portion of a Prime editor and the C-terminal portion of a PE fusion are delivered by separate recombinant virus vectors (e.g., adeno-associated virus vectors, adenovirus vectors, or herpes simplex virus vectors) into the same cell, since the full-length Cas9 protein or prime editors exceeds the packaging limit of various virus vectors, e.g., rAAV (˜4.9 kb).

[1029] Thus, in one embodiment, the disclosure contemplates vectors capable of delivering split prime editor, or split components thereof. In some embodiments, a composition for delivering the split Cas9 protein or split prime editor into a cell (e.g., a mammalian cell, a human cell) is provided. In some embodiments, the composition of the present disclosure comprises: (i) a first recombinant adeno-associated virus (rAAV) particle comprising a first nucleotide sequence encoding a N-terminal portion of a Cas9 protein or prime editor fused at its C-terminus to an intein-N; and (ii) a second recombinant adeno-associated virus (rAAV) particle comprising a second nucleotide sequence encoding an intein-C fused to the N-terminus of a C-terminal portion of the Cas9 protein or prime editor. The rAAV particles of the present disclosure comprise a rAAV vector (i.e., a recombinant genome of the rAAV) encapsulated in the viral capsid proteins.

[1030] In some embodiments, the rAAV vector comprises: (1) a heterologous nucleic acid region comprising the first or second nucleotide sequence encoding the N-terminal portion or C-terminal portion of a split Cas9 protein or a split prime editor in any form as described herein, (2) one or more nucleotide sequences comprising a sequence that facilitates expression of the heterologous nucleic acid region (e.g., a promoter), and (3) one or more nucleic acid regions comprising a sequence that facilitate integration of the heterologous nucleic acid region (optionally with the one or more nucleic acid regions comprising a sequence that facilitates expression) into the genome of a cell. In some embodiments, viral sequences that facilitate integration comprise Inverted Terminal Repeat (ITR) sequences. In some embodiments, the first or second nucleotide sequence encoding the N-terminal portion or C-terminal portion of a split Cas9 protein or a split prime editor is flanked on each side by an ITR sequence. In some embodiments, the nucleic acid vector further comprises a region encoding an AAV Rep protein as described herein, either contained within the region flanked by ITRs or outside the region. The ITR sequences can be derived from any AAV serotype (e.g., 1, 2, 3, 4, 5, 6, 7, 8, 9, or 10) or can be derived from more than one serotype. In some embodiments, the ITR sequences are derived from AAV2 or AAV6.

[1031] Thus, in some embodiments, the rAAV particles disclosed herein comprise at least one rAAV2 particle, rAAV6 particle, rAAV8 particle, rPHP.B particle, rPHP.eB particle, or rAAV9 particle, or a variant thereof. In particular embodiments, the disclosed rAAV particles are rPHP.B particles, rPHP.eB particles, rAAV9 particles.

[1032] ITR sequences and plasmids containing ITR sequences are known in the art and commercially available (see, e.g., products and services available from Vector Biolabs, Philadelphia, PA; Cellbiolabs, San Diego, CA; Agilent Technologies, Santa Clara, Ca; and Addgene, Cambridge, MA; and Gene delivery to skeletal muscle results in sustained expression and systemic delivery of a therapeutic protein. Kessler P D, Podsakoff G M, Chen X, McQuiston S A, Colosi P C, Matelis L A, Kurtzman G J, Byrne B J. Proc Natl Acad Sci USA. 1996 Nov. 26; 93(24):14082-7; and Curtis A. Machida. Methods in Molecular Medicine™. Viral Vectors for Gene Therapy Methods and Protocols. 10.1385/1-59259-304-6:201 © Humana Press Inc. 2003. Chapter 10. Targeted Integration by Adeno-Associated Virus. Matthew D. Weitzman, Samuel M. Young Jr., Toni Cathomen and Richard Jude Samulski; U.S. Pat. Nos. 5,139,941 and 5,962,313, all of which are incorporated herein by reference).

[1033] In some embodiments, the rAAV vector of the present disclosure comprises one or more regulatory elements to control the expression of the heterologous nucleic acid region (e.g., promoters, transcriptional terminators, and/or other regulatory elements). In some embodiments, the first and/or second nucleotide sequence is operably linked to one or more (e.g., 1, 2, 3, 4, 5, or more) transcriptional terminators. Non-limiting examples of transcriptional terminators that may be used in accordance with the present disclosure include transcription terminators of the bovine growth hormone gene (bGH), human growth hormone gene (hGH), SV40, CW3, #, or combinations thereof. The efficiencies of several transcriptional terminators have been tested to determine their respective effects in the expression level of the split Cas9 protein or the split prime editor. In some embodiments, the transcriptional terminator used in the present disclosure is a bGH transcriptional terminator. In some embodiments, the rAAV vector further comprises a Woodchuck Hepatitis Virus Posttranscriptional Regulatory Element (WPRE). In certain embodiments, the WPRE is a truncated WPRE sequence, such as “W3.” In some embodiments, the WPRE is inserted 5′ of the transcriptional terminator. Such sequences, when transcribed, create a tertiary structure which enhances expression, in particular, from viral vectors.

[1034] In some embodiments, the vectors used herein may encode the Prime editors, or any of the components thereof (e.g., napDNAbp, linkers, or polymerases). In addition, the vectors used herein may encode the pegRNAs, and/or the accessory gRNA for second strand nicking. The vectors may be capable of driving expression of one or more coding sequences in a cell. In some embodiments, the cell may be a prokaryotic cell, such as, e.g., a bacterial cell. In some embodiments, the cell may be a eukaryotic cell, such as, e.g., a yeast, plant, insect, or mammalian cell. In some embodiments, the eukaryotic cell may be a mammalian cell. In some embodiments, the eukaryotic cell may be a rodent cell. In some embodiments, the eukaryotic cell may be a human cell. Suitable promoters to drive expression in different types of cells are known in the art. In some embodiments, the promoter may be wild-type. In other embodiments, the promoter may be modified for more efficient or efficacious expression. In yet other embodiments, the promoter may be truncated yet retain its function. For example, the promoter may have a normal size or a reduced size that is suitable for proper packaging of the vector into a virus.

[1035] In some embodiments, the promoters that may be used in the prime editor vectors may be constitutive, inducible, or tissue-specific. In some embodiments, the promoters may be a constitutive promoters. Non-limiting exemplary constitutive promoters include cytomegalovirus immediate early promoter (CMV), simian virus (SV40) promoter, adenovirus major late (MLP) promoter, Rous sarcoma virus (RSV) promoter, mouse mammary tumor virus (MMTV) promoter, phosphoglycerate kinase (PGK) promoter, elongation factor-alpha (EFla) promoter, ubiquitin promoters, actin promoters, tubulin promoters, immunoglobulin promoters, a functional fragment thereof, or a combination of any of the foregoing. In some embodiments, the promoter may be a CMV promoter. In some embodiments, the promoter may be a truncated CMV promoter. In other embodiments, the promoter may be an EFla promoter. In some embodiments, the promoter may be an inducible promoter. Non-limiting exemplary inducible promoters include those inducible by heat shock, light, chemicals, peptides, metals, steroids, antibiotics, or alcohol. In some embodiments, the inducible promoter may be one that has a low basal (non-induced) expression level, such as, e.g., the Tet-On® promoter (Clontech). In some embodiments, the promoter may be a tissue-specific promoter. In some embodiments, the tissue-specific promoter is exclusively or predominantly expressed in liver tissue. Non-limiting exemplary tissue-specific promoters include B29 promoter, CD14 promoter, CD43 promoter, CD45 promoter, CD68 promoter, desmin promoter, elastase-1 promoter, endoglin promoter, fibronectin promoter, Flt-1 promoter, GFAP promoter, GPIIb promoter, ICAM-2 promoter, INF-β promoter, Mb promoter, Nphsl promoter, OG-2 promoter, SP-B promoter, SYN1 promoter, and WASP promoter.

[1036] In some embodiments, the prime editor vectors (e.g., including any vectors encoding the prime editor and/or the pegRNAs, and/or the accessory second strand nicking gRNAs) may comprise inducible promoters to start expression only after it is delivered to a target cell. Non-limiting exemplary inducible promoters include those inducible by heat shock, light, chemicals, peptides, metals, steroids, antibiotics, or alcohol. In some embodiments, the inducible promoter may be one that has a low basal (non-induced) expression level, such as, e.g., the Tet-On® promoter (Clontech).

[1037] In additional embodiments, the prime editor vectors (e.g., including any vectors encoding the prime editor and/or the pegRNAs, and/or the accessory second strand nicking gRNAs) may comprise tissue-specific promoters to start expression only after it is delivered into a specific tissue. Non-limiting exemplary tissue-specific promoters include B29 promoter, CD14 promoter, CD43 promoter, CD45 promoter, CD68 promoter, desmin promoter, elastase-1 promoter, endoglin promoter, fibronectin promoter, Flt-1 promoter, GFAP promoter, GPIIb promoter, ICAM-2 promoter, INF-β promoter, Mb promoter, Nphsl promoter, OG-2 promoter, SP-B promoter, SYN1 promoter, and WASP promoter.

[1038] In some embodiments, the nucleotide sequence encoding the pegRNA (or any guide RNAs used in connection with prime editing) may be operably linked to at least one transcriptional or translational control sequence. In some embodiments, the nucleotide sequence encoding the guide RNA may be operably linked to at least one promoter. In some embodiments, the promoter may be recognized by RNA polymerase III (Pol III). Non-limiting examples of Pol III promoters include U6, HI and tRNA promoters. In some embodiments, the nucleotide sequence encoding the guide RNA may be operably linked to a mouse or human U6 promoter. In other embodiments, the nucleotide sequence encoding the guide RNA may be operably linked to a mouse or human HI promoter. In some embodiments, the nucleotide sequence encoding the guide RNA may be operably linked to a mouse or human tRNA promoter. In embodiments with more than one guide RNA, the promoters used to drive expression may be the same or different. In some embodiments, the nucleotide encoding the crRNA of the guide RNA and the nucleotide encoding the tracr RNA of the guide RNA may be provided on the same vector. In some embodiments, the nucleotide encoding the crRNA and the nucleotide encoding the tracr RNA may be driven by the same promoter. In some embodiments, the crRNA and tracr RNA may be transcribed into a single transcript. For example, the crRNA and tracr RNA may be processed from the single transcript to form a double-molecule guide RNA. Alternatively, the crRNA and tracr RNA may be transcribed into a single-molecule guide RNA.

[1039] In some embodiments, the nucleotide sequence encoding the guide RNA may be located on the same vector comprising the nucleotide sequence encoding the Prime editor. In some embodiments, expression of the guide RNA and of the Prime editor may be driven by their corresponding promoters. In some embodiments, expression of the guide RNA may be driven by the same promoter that drives expression of the Prime editor. In some embodiments, the guide RNA and the Prime editor transcript may be contained within a single transcript. For example, the guide RNA may be within an untranslated region (UTR) of the Cas9 protein transcript. In some embodiments, the guide RNA may be within the 5′ UTR of the Prime editor transcript. In other embodiments, the guide RNA may be within the 3′ UTR of the Prime editor transcript. In some embodiments, the intracellular half-life of the Prime editor transcript may be reduced by containing the guide RNA within its 3′ UTR and thereby shortening the length of its 3′ UTR. In additional embodiments, the guide RNA may be within an intron of the Prime editor transcript. In some embodiments, suitable splice sites may be added at the intron within which the guide RNA is located such that the guide RNA is properly spliced out of the transcript. In some embodiments, expression of the Cas9 protein and the guide RNA in close proximity on the same vector may facilitate more efficient formation of the CRISPR complex.

[1040] The prime editor vector system may comprise one vector, or two vectors, or three vectors, or four vectors, or five vector, or more. In some embodiments, the vector system may comprise one single vector, which encodes both the Prime editor and pegRNA. In other embodiments, the vector system may comprise two vectors, wherein one vector encodes the Prime editor and the other encodes the pegRNA. In additional embodiments, the vector system may comprise three vectors, wherein the third vector encodes the second strand nicking gRNA used in the herein methods.

[1041] In some embodiments, the composition comprising the rAAV particle (in any form contemplated herein) further comprises a pharmaceutically acceptable carrier. In some embodiments, the composition is formulated in appropriate pharmaceutical vehicles for administration to human or animal subjects.

[1042] Some examples of materials which can serve as pharmaceutically-acceptable carriers include: (1) sugars, such as lactose, glucose and sucrose; (2) starches, such as corn starch and potato starch; (3) cellulose, and its derivatives, such as sodium carboxymethyl cellulose, methylcellulose, ethyl cellulose, microcrystalline cellulose and cellulose acetate; (4) powdered tragacanth; (5) malt; (6) gelatin; (7) lubricating agents, such as magnesium stearate, sodium lauryl sulfate and talc; (8) excipients, such as cocoa butter and suppository waxes; (9) oils, such as peanut oil, cottonseed oil, safflower oil, sesame oil, olive oil, corn oil and soybean oil; (10) glycols, such as propylene glycol; (11) polyols, such as glycerin, sorbitol, mannitol and polyethylene glycol (PEG); (12) esters, such as ethyl oleate and ethyl laurate; (13) agar; (14) buffering agents, such as magnesium hydroxide and aluminum hydroxide; (15) alginic acid; (16) pyrogen-free water; (17) isotonic saline; (18) Ringer's solution; (19) ethyl alcohol; (20) pH buffered solutions; (21) polyesters, polycarbonates and/or polyanhydrides; (22) bulking agents, such as polypeptides and amino acids (23) serum component, such as serum albumin, HDL and LDL; (22) C2-C12 alcohols, such as ethanol; and (23) other non-toxic compatible substances employed in pharmaceutical formulations. Wetting agents, coloring agents, release agents, coating agents, sweetening agents, flavoring agents, perfuming agents, preservative and antioxidants can also be present in the formulation. The terms such as “excipient”, “carrier”, “pharmaceutically acceptable carrier” or the like are used interchangeably herein.

### Delivery Methods

[1043] In some aspects, the invention provides methods comprising delivering one or more polynucleotides, such as or one or more vectors as described herein, one or more transcripts thereof, and/or one or proteins transcribed therefrom, to a host cell. In some aspects, the invention further provides cells produced by such methods, and organisms (such as animals, plants, or fungi) comprising or produced from such cells. In some embodiments, a base editor as described herein in combination with (and optionally complexed with) a guide sequence is delivered to a cell.

[1044] Exemplary delivery strategies are described herein elsewhere, which include vector-based strategies, PE ribonucleoprotein complex delivery, and delivery of PE by mRNA methods.

[1045] In some embodiments, the method of delivery provided comprises nucleofection, microinjection, biolistics, virosomes, liposomes, immunoliposomes, polycation or lipid:nucleic acid conjugates, naked DNA, artificial virions, and agent-enhanced uptake of DNA.

[1046] Exemplary methods of delivery of nucleic acids include lipofection, nucleofection, electroporation, stable genome integration (e.g., piggybac), microinjection, biolistics, virosomes, liposomes, immunoliposomes, polycation or lipid:nucleic acid conjugates, naked DNA, artificial virions, and agent-enhanced uptake of DNA. Lipofection is described in e.g., U.S. Pat. Nos. 5,049,386, 4,946,787; and 4,897,355) and lipofection reagents are sold commercially (e.g., Transfectam™, Lipofectin™ and SF Cell Line 4D-Nucleofector X Kit™ (Lonza)). Cationic and neutral lipids that are suitable for efficient receptor-recognition lipofection of polynucleotides include those of Feigner, WO 91/17424; WO 91/16024. Delivery may be to cells (e.g. in vitro or ex vivo administration) or target tissues (e.g. in vivo administration). Delivery may be achieved through the use of RNP complexes.

[1047] The preparation of lipid:nucleic acid complexes, including targeted liposomes such as immunolipid complexes, is well known to one of skill in the art (see, e.g., Crystal, Science 270:404-410 (1995); Blaese et al., Cancer Gene Ther. 2:291-297 (1995); Behr et al., Bioconjugate Chem. 5:382-389 (1994); Remy et al., Bioconjugate Chem. 5:647-654 (1994); Gao et al., Gene Therapy 2:710-722 (1995); Ahmad et al., Cancer Res. 52:4817-4820 (1992); U.S. Pat. Nos. 4,186,183, 4,217,344, 4,235,871, 4,261,975, 4,485,054, 4,501,728, 4,774,085, 4,837,028, and 4,946,787).

[1048] In other embodiments, the method of delivery and vector provided herein is an RNP complex. RNP delivery of fusion proteins markedly increases the DNA specificity of base editing. RNP delivery of fusion proteins leads to decoupling of on- and off-target DNA editing. RNP delivery ablates off-target editing at non-repetitive sites while maintaining on-target editing comparable to plasmid delivery, and greatly reduces off-target DNA editing even at the highly repetitive VEGFA site 2. See Rees, H. A. et al., Improving the DNA specificity and applicability of base editing through protein engineering and protein delivery, Nat. Commun. 8, 15790 (2017), U.S. Pat. No. 9,526,784, issued Dec. 27, 2016, and U.S. Pat. No. 9,737,604, issued Aug. 22, 2017, each of which is incorporated by reference herein.

[1049] Additional methods for the delivery of nucleic acids to cells are known to those skilled in the art. See, for example, US 2003/0087817, incorporated herein by reference.

[1050] Other aspects of the present disclosure provide methods of delivering the prime editor constructs into a cell to form a complete and functional prime editor within a cell. For example, in some embodiments, a cell is contacted with a composition described herein (e.g., compositions comprising nucleotide sequences encoding the split Cas9 or the split prime editor or AAV particles containing nucleic acid vectors comprising such nucleotide sequences). In some embodiments, the contacting results in the delivery of such nucleotide sequences into a cell, wherein the N-terminal portion of the Cas9 protein or the prime editor and the C-terminal portion of the Cas9 protein or the prime editor are expressed in the cell and are joined to form a complete Cas9 protein or a complete prime editor.

[1051] It should be appreciated that any rAAV particle, nucleic acid molecule or composition provided herein may be introduced into the cell in any suitable way, either stably or transiently. In some embodiments, the disclosed proteins may be transfected into the cell. In some embodiments, the cell may be transduced or transfected with a nucleic acid molecule. For example, a cell may be transduced (e.g., with a virus encoding a split protein), or transfected (e.g., with a plasmid encoding a split protein) with a nucleic acid molecule that encodes a split protein, or an rAAV particle containing a viral genome encoding one or more nucleic acid molecules. Such transduction may be a stable or transient transduction. In some embodiments, cells expressing a split protein or containing a split protein may be transduced or transfected with one or more guide RNA sequences, for example in delivery of a split Cas9 (e.g., nCas9) protein. In some embodiments, a plasmid expressing a split protein may be introduced into cells through electroporation, transient (e.g., lipofection) and stable genome integration (e.g., piggybac) and viral transduction or other methods known to those of skill in the art.

[1052] In certain embodiments, the compositions provided herein comprise a lipid and/or polymer. In certain embodiments, the lipid and/or polymer is cationic. The preparation of such lipid particles is well known. See, e.g. U.S. Pat. Nos. 4,880,635; 4,906,477; 4,911,928; 4,917,951; 4,920,016; 4,921,757; and 9,737,604, each of which is incorporated herein by reference.

[1053] The guide RNA sequence may be 15-100 nucleotides in length and comprise a sequence of at least 10, at least 15, or at least 20 contiguous nucleotides that is complementary to a target nucleotide sequence. The guide RNA may comprise a sequence of 15, 16, 17, 18, 19, 20, 21, 22, 23, 24, 25, 26, 27, 28, 29, 30, 31, 32, 33, 34, 35, 36, 37, 38, 39, or 40 contiguous nucleotides that is complementary to a target nucleotide sequence. The guide RNA may be 15, 16, 17, 18, 19, 20, 21, 22, 23, 24, 25, 26, 27, 28, 29, 30, 31, 32, 33, 34, 35, 36, 37, 38, 39, 40, 41, 42, 43, 44, 45, 46, 47, 48, 49, or 50 nucleotides in length.

[1054] In some embodiments, the target nucleotide sequence is a DNA sequence in a genome, e.g. a eukaryotic genome. In certain embodiments, the target nucleotide sequence is in a mammalian (e.g. a human) genome.

[1055] The compositions of this disclosure may be administered or packaged as a unit dose, for example. The term “unit dose” when used in reference to a pharmaceutical composition of the present disclosure refers to physically discrete units suitable as unitary dosage for the subject, each unit containing a predetermined quantity of active material calculated to produce the desired therapeutic effect in association with the required diluent, i.e., a carrier or vehicle.

[1056] Treatment of a disease or disorder includes delaying the development or progression of the disease, or reducing disease severity. Treating the disease does not necessarily require curative results.

[1057] As used therein, “delaying” the development of a disease means to defer, hinder, slow, retard, stabilize, and/or postpone progression of the disease. This delay can be of varying lengths of time, depending on the history of the disease and/or individuals being treated. A method that “delays” or alleviates the development of a disease, or delays the onset of the disease, is a method that reduces probability of developing one or more symptoms of the disease in a given time frame and/or reduces extent of the symptoms in a given time frame, when compared to not using the method. Such comparisons are typically based on clinical studies, using a number of subjects sufficient to give a statistically significant result.

[1058] “Development” or “progression” of a disease means initial manifestations and/or ensuing progression of the disease. Development of the disease can be detectable and assessed using standard clinical techniques as well known in the art. However, development also refers to progression that may be undetectable. For purpose of this disclosure, development or progression refers to the biological course of the symptoms. “Development” includes occurrence, recurrence, and onset.

[1059] As used herein “onset” or “occurrence” of a disease includes initial onset and/or recurrence. Conventional methods, known to those of ordinary skill in the art of medicine, can be used to administer the isolated polypeptide or pharmaceutical composition to the subject, depending upon the type of disease to be treated or the site of the disease.

[1060] Without further elaboration, it is believed that one skilled in the art can, based on the above description, utilize the present disclosure to its fullest extent. The following specific embodiments are, therefore, to be construed as merely illustrative, and not limitative of the remainder of the disclosure in any way whatsoever. All publications cited herein are incorporated by reference for the purposes or subject matter referenced herein.

### EMBODIMENTS

[1061] The disclosure further relates to the following non-limiting numbered paragraphs.
[1062] 1. A prime editing guide RNA (PEgRNA) comprising:
   [1063] a spacer sequence that comprises a region of complementarity to a target strand of a double-stranded target DNA sequence;
   [1064] a nucleic acid extension arm comprising a DNA synthesis template core that associates with a nucleic acid programmable DNA binding protein (napDNAbp), wherein the primer binding site comprises a region of complementarity to a non-target strand of the double-stranded target DNA sequence;
   [1065] wherein the DNA synthesis template comprises a region of complementarity to the non-target strand of the double-stranded target DNA sequence and comprises one or more nucleotide edits compared to the double-stranded target DNA sequence; and wherein the extension arm further comprises a nucleic acid moiety selected from the group consisting of a toe-loop, hairpin, stem-loop, pseudoknot, aptamer. G-quadraplex, tRNA, riboswitch, or ribozyme.
[1066] 2. The PEgRNA of paragraph 1, wherein the nucleic acid moiety is at the 3′ end of the extension arm.
[1067] 3. The PEgRNA of paragraph 1, wherein the nucleic acid moiety is at the 5′ end of the extension arm.
[1068] 4. The PEgRNA of paragraph 1, wherein the nucleic acid moiety comprises a frameshifting pseudoknot from a Moloney murine leukemia virus (M-MLV) genome (a Mpknot), optionally wherein the Mpknot is a Mpknot1 moiety having a nucleotide sequence selected from the group consisting of: SEQ ID NO: 3930 (Mpknot1), SEQ ID NO: 3931 (Mpknot1 3′ trimmed). SEQ ID NO: 3932 (Mpknot1 with 5′ extra), SEQ ID NO: 3933 (Mpknot1 U38A), SEQ ID NO: 3934 (Mpknot1 U38A A29C). SEQ ID NO: 3935 (MMLC A29C), SEQ ID NO: 3936 (Mpknot1 with 5′ extra and U38A). SEQ ID NO: 3937 (Mpknot1 with 5′ extra and U38A A29C), and SEQ ID NO: 3938 (Mpknot1 with 5′ extra and A29C), or a nucleotide sequence having at least 80% sequence identity therewith.
[1069] 5. The PEgRNA of paragraph 1, wherein the nucleic acid moiety comprises a G-quadruplex, optionally wherein the G-quadruplex has a nucleotide sequence selected from the group consisting of: SEQ ID NO: 3939 (tns1), SEQ ID NO: 3940 (stk40). SEQ ID NO: 3941 (apc2). SEQ ID NO: 3942 (ceacam4). SEQ ID NO: 3943 (pitpnm3), SEQ ID NO: 3944 (rlf), SEQ ID NO: 3945 (erc1). SEQ ID NO: 3946 (ube3c), SEQ ID NO: 3947 (taf15), SEQ ID NO: 3948 (stard3), and SEQ ID NO: 3949 (g2), or a nucleotide sequence having at least 80% sequence identity therewith.
[1070] 6. The PEgRNA of paragraph 1, wherein the nucleic acid moiety comprises a prequeosine1 riboswitch aptamer.
[1071] 7. The PEgRNA of paragraph 6, wherein the nucleic acid moiety comprises an evolved prequeosine1-1 riboswitch aptamer (evopreQ1), optionally wherein the evopreQ1 has a nucleotide sequence selected from the group consisting of: SEQ ID NO: 3950 (evopreq1), SEQ ID NO: 3951 (evopreq1motif1), SEQ ID NO: 3952 (evopreq1motif2). SEQ ID NO: 3953 (evopreq1motif3), SEQ ID NO: 3954 (shorter preq1-1), SEQ ID NO: 3955 (preq1-1 G5C (mut1)), and SEQ ID NO: 3956 (preq1-1 G15C (mut2)), or a nucleotide sequence having at least 80% sequence identity therewith.
[1072] 8. The PEgRNA of paragraph 1, wherein the nucleic acid moiety comprises a tRNA moiety having a nucleotide sequence of SEQ ID NO: 3957, or a nucleotide sequence having at least 80% sequence identity therewith.
[1073] 9. The PEgRNA of paragraph 1, wherein the nucleic acid moiety has a nucleotide sequence of SEQ ID NO: 3958 (xrn1), or a nucleotide sequence having at least 80% sequence identity therewith.
[1074] 10. The PEgRNA of paragraph 1, wherein the nucleic acid moiety comprises a P4-P6 domain of a group I intron, optionally wherein the P4-P6 domain has a nucleotide sequence of SEQ ID NO: 3959, or a nucleotide sequence having at least 80% sequence identity therewith.
[1075] 11. The PEgRNA of any of paragraphs 1-10, wherein the PEgRNA further comprises a linker.
[1076] 12. The PEgRNA of paragraph 11, wherein the linker is between the nucleic acid moiety and another component of the PEgRNA.
[1077] 13. The PEgRNA of paragraph 11, wherein the linker is between the nucleic acid moiety and the primer binding site or between the gRNA core and the nucleic acid moiety. PEgRNA
[1078] 14. The PEgRNA of paragraph 11, wherein the linker comprises a nucleotide sequence selected from the group consisting of SEQ ID NO: 3960, SEQ ID NO: 3961. SEQ ID NO: 3962. SEQ ID NO: 3963, SEQ ID NO: 3964. SEQ ID NO: 3965, SEQ ID NO: 3966. SEQ ID NO: 3967. SEQ ID NO: 3968, SEQ ID NO: 3969. SEQ ID NO: 3970, and SEQ ID NO: 3971.
[1079] 15. The PEgRNA of paragraph 11 wherein the linker is at least 3 nucleotides, at least 4 nucleotides, at least 5 nucleotides, at least 6 nucleotides, at least 7 nucleotides, at least 8 nucleotides, at least 9 nucleotides, at least 10 nucleotides, at least 11 nucleotides, at least 12 nucleotides, at least 13 nucleotides, at least 14 nucleotides, at least 15 nucleotides, at least 16 nucleotides, at least 17 nucleotides, at least 18 nucleotides, at least 19 nucleotides, at least 20 nucleotides, at least 21 nucleotides, at least 22 nucleotides, at least 23 nucleotides, at least 24 nucleotides, at least 25 nucleotides, at least 26 nucleotides, at least 27 nucleotides, at least 28 nucleotides, at least 29 nucleotides, or at least 30 nucleotides in length, wherein the linker is no longer than 50 nucleotides.
[1080] 16. The PEgRNA of paragraph 11, wherein the linker is 1 to 5 nucleotides, 5 to 10 nucleotides, 10 to 20 nucleotides, 15 to 25 nucleotides, 20 to 30 nucleotides, 25 to 35 nucleotides, 30 to 40 nucleotides, 35 to 45 nucleotides, or 40 to 50 nucleotides in length; or wherein the linker is 1 to 50, 3 to 50, 5 to 50, or 8 to 50 nucleotides in length.
[1081] 17. The PEgRNA of paragraph 11, wherein the linker is 8 nucleotides in length.
[1082] 18. The PEgRNA of any one of paragraphs 4-17, wherein the extension arm is positioned at the 3′ or 5′ end of the guide RNA, and wherein the nucleic acid extension arm comprises DNA or RNA.
[1083] 19. The PEgRNA of paragraph 18, wherein the primer binding site comprises a region of complementarity to a region upstream of a nick site in the non-target strand of the target DNA sequence, wherein the nick site is characteristic of the napDNAbp.
[1084] 20. The PEgRNA of paragraph 19, wherein the DNA synthesis template comprises a region of complementarity to a region downstream of the nick site in the non-target strand of the target DNA sequence.
[1085] 21. The PEgRNA of paragraph 18, wherein primer binding site comprises a region of complementarity to a region immediately upstream of a nick site in the non-target strand of the target DNA sequence.
[1086] 22. The PEgRNA of paragraph 18, wherein the nucleic acid extension arm is at least 5 nucleotides, at least 6 nucleotides, at least 7 nucleotides, at least 8 nucleotides, at least 9 nucleotides, at least 10 nucleotides, at least 11 nucleotides, at least 12 nucleotides, at least 13 nucleotides, at least 14 nucleotides, at least 15 nucleotides, at least 16 nucleotides, at least 17 nucleotides, at least 18 nucleotides, at least 19 nucleotides, at least 20 nucleotides, at least 21 nucleotides, at least 22 nucleotides, at least 23 nucleotides, at least 24 nucleotides, at least 25 nucleotides, at least 26 nucleotides, at least 27 nucleotides, at least 28 nucleotides, at least 29 nucleotides, at least 30 nucleotides, at least 31 nucleotides, at least 32 nucleotides, at least 33 nucleotides, at least 34 nucleotides, at least 35 nucleotides, at least 36 nucleotides, at least 37 nucleotides, at least 38 nucleotides, at least 39 nucleotides, at least 40 nucleotides, at least 41 nucleotides, at least 42 nucleotides, at least 43 nucleotides, at least 44 nucleotides, at least 45 nucleotides, at least 46 nucleotides, at least 47 nucleotides, at least 48 nucleotides, at least 49 nucleotides, or at least 50 nucleotides; or wherein the nucleic acid extension arm is 10 to 20, 20 to 30, 30 to 40.40 to 50, 50 to 60, 60 to 70, 70 to 80, 80 to 90, 90 to 100, 100 to 110, 110 to 120, 20 to 120, 40 to 120, 60 to 120, 80 to 120, 100 to 120, 40 to 100, 60 to 100, 80 to 100, or 60 to 80 nucleotides in length; or wherein the nucleic acid extension arm is 15 to 300, 20 to 250, 20 to 200, 20 to 150, 25 to 150, 15 to 100, 20 to 100 or 25 to 100 nucleotides in length; or wherein the nucleic acid extension arm is 1, 2, 3, 4, 5, 6, 7, 8, 9, 10, 11, 12, 13, 14, 15, 16, 17, 18, 19, 20, 21, 22, 23, 24, 25, 26, 27, 28, 29, 30, 31, 32, 33, 34, 35, 36, 37, 38, 39, 40, 41, 42, 43, 44, 45, 46, 47, 48, 49, 50, 51, 52, 53, 54, 55, 56, 57, 58, 59, 60, 61, 62, 63, 64, 65, 66, 67, 68, 69, 70, 71, 72, 73, 74, 75, 76, 77, 78, 79, 80, 81, 82, 83, 84, 85, 86, 87, 88, 89, 90, 91, 92, 93, 94, 95, 96, 97, 98, 99, or 100 nucleotides in length.
[1087] 23. The PEgRNA of paragraph 18, wherein the DNA synthesis template is at least 3 nucleotides, at least 4 nucleotides, at least 5 nucleotides, at least 6 nucleotides, at least 7 nucleotides, at least 8 nucleotides, at least 9 nucleotides, at least 10 nucleotides, at least 11 nucleotides, at least 12 nucleotides, at least 13 nucleotides, at least 14 nucleotides, or at least 15 nucleotides in length; or wherein the DNA synthesis template is 1 to 10, 5 to 15, 10 to 20, 20 to 30, 30 to 40, 40 to 50, 50 to 60, 60 to 70, 70 to 80, 80 to 90, 90 to 100, 10 to 30, 10 to 40, 10 to 50, 10 to 60, 20 to 40, 20 to 60, 30 to 100, 40 to 100, 50 to 100, 60 to 100, or 70 to 100 nucleotides in length; wherein the DNA synthesis template is 5 to 300, 5 to 250, 15 to 200, 15 to 150, 5 to 100, 10 to 100, or 15 to 100 nucleotides in length; or wherein the DNA synthesis template is 1, 2, 3, 4, 5, 6, 7, 8, 9, 10, 11, 12, 13, 14, 15, 16, 17, 18, 19, 20, 21, 22, 23, 24, 25, 26, 27, 28, 29, 30, 31, 32, 33, 34, 35, 36, 37, 38, 39, 40, 41, 42, 43, 44, 45, 46, 47, 48, 49, 50, 51, 52, 53, 54, 55, 56, 57, 58, 59, 60, 61, 62, 63, 64, 65, 66, 67, 68, 69, 70, 71, 72, 73, 74, 75, 76, 77, 78, 79, or 80 nucleotides in length.
[1088] 24. The PEgRNA of paragraph 23, wherein the DNA synthesis template is from 15 to 35 nucleotides in length.
[1089] 25. The PEgRNA of paragraph 18, wherein the primer binding site is at least 3 nucleotides, at least 4 nucleotides, at least 5 nucleotides, at least 6 nucleotides, at least 7 nucleotides, at least 8 nucleotides, at least 9 nucleotides, at least 10 nucleotides, at least 11 nucleotides, at least 12 nucleotides, at least 13 nucleotides, at least 14 nucleotides, or at least 15 nucleotides in length, or wherein the primer binding site is 1 to 10 nucleotides, 5 to 10 nucleotides, 10 to 15 nucleotides, 10 to 20 nucleotides, 8 to 20 nucleotides, 15 to 25 nucleotides, 20 to 30 nucleotides, or 25 to 30 nucleotides in length; wherein the primer binding site is 3 to 60, 5 to 60, 8 to 50, or 12 to 50 nucleotides in length, or wherein the primer binding site is 1, 2, 3, 4, 5, 6, 7, 8, 9, 10, 11, 12, 13, 14, 15, 16, 17, 18, 19, 20, 21, 22, 23, 24, or 25 nucleotides in length.
[1090] 26. The PEgRNA of any one of paragraphs 1-25, wherein the gRNA core comprises a direct repeat, wherein the direct repeat does not contain four or more consecutive A-U base pairs.
[1091] 27. The PEgRNA of paragraph 26, wherein the direct repeat comprises the nucleotide sequence UUUA.
[1092] 28. The PEgRNA of any one of paragraphs 1-27, wherein the PEgRNA comprises a chemically or biologically modified nucleotide or a nucleotide analog.
[1093] 29. The PEgRNA of paragraph 28, wherein the three consecutive nucleotides at the 5′ end of the PEgRNA comprises one or more chemically modified nucleotide, and/or wherein the three consecutive nucleotides at the 3′ end of the PEgRNA comprises one or more chemically modified nucleotide.
[1094] 30. A prime editor system comprising:
[1095] (a) a nucleic acid programmable DNA binding protein (napDNAbp)
[1096] (b) a domain comprising an DNA polymerase activity; and
[1097] (c) a PEgRNA of any one of paragraphs 1-29.
[1098] 31. The prime editor system of paragraph 30, wherein the PEgRNA and the napDNAbp and/or the domain comprising DNA polymerase activity form a complex.
[1099] 32. The prime editor system of paragraph 30 or 31, wherein the domain having DNA polymerase activity and the napDNAbp are fused to form a fusion protein.
[1100] 33. The prime editor system of any one of paragraphs 30-32, wherein the napDNAbp has a nickase activity.
[1101] 34. The prime editor system of any one of paragraphs 30-32, wherein the napDNAbp is a Cas9 protein or variant thereof.
[1102] 35. The prime editor system of paragraph 34, wherein the napDNAbp is a nuclease active Cas9, a nuclease inactive Cas9 (dCas9), or a Cas9 nickase (nCas9).
[1103] 36. The prime editor system of paragraph 35, wherein the napDNAbp is Cas9 nickase (nCas9).
[1104] 37. The prime editor system of any one of paragraphs 30-32, wherein the napDNAbp is selected from the group consisting of: Cas9, Cas12e, Cas12d, Cas12a. Cas12b1. Cas13a, Cas12c, and Argonaute and optionally has a nickase activity.
[1105] 38. The prime editor system of any one of paragraphs 30-37, wherein the domain comprising an RNA-dependent DNA polymerase activity is a reverse transcriptase comprising an amino acid sequence having at least 80%, 85%, 90%, 95%, 98%, or 99% sequence identity with the amino acid sequence of any one of SEQ ID NOs: 89-100, 105-122, 128-129, 132, 139, 143, 149, 154, 159, 235, 454.471, 516, 662, 700.701-716.739-741, and 766.
[1106] 39. The prime editor system of any one of paragraphs 30-37, wherein the domain comprising an RNA-dependent DNA polymerase activity is a reverse transcriptase comprising any one of the amino acid sequences of SEQ ID NO: 89-100, 105-122, 128-129, 132, 139, 143, 149, 154, 159, 235.454, 471, 516, 662.700, 701-716, 739-741, and 766.
[1107] 40. The prime editor system of paragraph 38, wherein the reverse transcriptase is a Moloney-Murine Leukemia Virus reverse transcriptase (M-MLVRT).
[1108] 41. The prime editor system of paragraph 40, wherein the RNA-dependent DNA polymerase domain comprises a variant Moloney-Murine Leukemia Virus reverse transcriptase (M-MLV RT) domain, wherein the variant M-MLV RT domain comprises one or more of the following mutations: P51X, S67X, E69X, L139X, T197X, D200X, H204X, F209X, E302X, T306X, F309X, W313X, T330X, L345X, L435X, N454X, D524X, E562X, D583X, H594X, L603X, E607X, or D653X relative to the amino acid sequence of SEQ ID NO: 89, and wherein X is any amino acid.
[1109] 42. The prime editor system of paragraph 41, wherein the variant M-MLV RT domain comprises one or more of the following mutations: P51L, S67K, E69K, L139P, T197A, D200N, H204R, F209N, E302K, E302R, T306K, F309N, W313F, T330P, L345G, L435G, N454K, D524G, E562Q, D583N, H594Q, L603W, E607K, or D653N relative to the amino acid sequence of SEQ ID NO: 89.
[1110] 43. The prime editor system of paragraph 41, wherein the variant M-MLV RT domain comprises an amino acid substitutions D200N, T330P and L603W relative to the amino acid sequence of SEQ ID NO: 89, optionally wherein the M-MLV RT domain comprises amino acid substitutions D200N, T306K, W313F, T330P, and L603W relative to the amino acid sequence of SEQ ID NO: 89.
[1111] 44. The prime editor system of any one of paragraphs 30-37, wherein the domain comprising an RNA-dependent DNA polymerase activity is a naturally-occurring reverse transcriptase from a retrovirus or a retrotransposon.
[1112] 45. A nucleic acid molecule encoding the PEgRNA of any one of paragraph 1-29.
[1113] 46. A nucleic acid molecule encoding the napDNAbp and/or the domain having DNA polymerase activity of any one of paragraphs 30-45.
[1114] 47. An expression vector comprising the nucleic acid molecule of paragraph 45 and/or the nucleic acid molecule of paragraph 46, optionally wherein the nucleic acid molecule is under the control of a promoter.
[1115] 48. The expression vector of paragraph 47, wherein the promoter is a polI promoter.
[1116] 49. The expression vector of paragraph 47, wherein the promoter is a U6 promoter.
[1117] 50. The expression vector of paragraph 47, wherein the promoter is a U6. U6v4. U6v7, or U6v9 promoter or a fragment thereof.
[1118] 51. A cell comprising the PEgRNA of any one of paragraphs 1-29.
[1119] 52. A cell comprising the prime editor system of any one of paragraphs 30-44, the nucleic acid molecule of paragraph 45 or 46, or the expression vector of any one of paragraphs 47-50.
[1120] 53. A lipid nanoparticle (LNP) comprising the PEgRNA of any one of paragraphs 1-29, the prime editor system of any one of paragraphs 30-44, or the nucleic acid molecule of paragraph 45 or 46.
[1121] 54. A ribonucleoprotein complex (RNP) comprising the PEgRNA of any one of paragraphs 1-29, the prime editor system of any one of paragraphs 30-44, or the nucleic acid molecule of paragraph 45 or 46.
[1122] 55. A pharmaceutical composition comprising: (i) PEgRNA of any one of paragraphs 1-29, the prime editor system of any one of paragraphs 30-44, or the nucleic acid molecule of paragraph 45 or 46PEgRNA, the expression vector of any one of paragraphs 47-50, the cell of paragraph 51 or 52, the LNP of paragraph 53, or the RNP of paragraph 54, and (ii) a pharmaceutically acceptable excipient.
[1123] 56. A kit composition comprising: (i) the PEgRNA of any one of paragraphs 1-29, the prime editor system of any one of paragraphs 30-44, or the nucleic acid molecule of paragraph 45 or 46, the expression vector of any one of paragraphs 47-50, the cell of paragraph 51 or 52, the LNP of paragraph 53, or the RNP of paragraph 54 PEgRNA (ii) a set of instructions for conducting prime editing.
[1124] 57. A method of prime editing comprising contacting a target DNA sequence with a PEgRNA of any of paragraphs 1-29 and a prime editor comprising a napDNAbp and a domain having a DNA polymerase activity, wherein the contacting installs one or more nucleotide edits in the target DNA sequence.
[1125] 58. The method of paragraph 57, wherein the editing efficiency is increased as compared to the editing efficiency when the target DNA is contacted with the prime editor and a control PEgRNA that does not contain the nucleic acid moiety PEgRNA.
[1126] 59. The method of paragraph 58, wherein the editing efficiency is increased by at least 1.5 fold.
[1127] 60. The method of paragraph 58, wherein the editing efficiency is increased by at least 2 fold.
[1128] 61. The method of paragraph 58, wherein the editing efficiency is increased by at least 3 fold, 4-fold, 5-fold, 6-fold, 7-fold, 8-fold, 9-fold, or 10-fold [1255], [1270].
[1129] 62. The method of any one of paragraphs 57-61, wherein the napDNAbp has a nickase activity.
[1130] 63. The method of carry one of paragraphs 57-62, wherein the napDNAbp is a Cas9 protein or variant thereof.
[1131] 64. The method of paragraph 63, wherein the napDNAbp is a nuclease active Cas9, a nuclease inactive Cas9 (dCas9), or a Cas9 nickase (nCas9).
[1132] 65. The method of paragraph 64, wherein the napDNAbp is Cas9 nickase (nCas9).
[1133] 66. The method of any one of paragraphs 57-62, wherein the napDNAbp is selected from the group consisting of: Cas9, Cas12e, Cas12d, Cas12a, Cas12b1, Cas13a, Cas12c, and Argonaute and optionally has a nickase activity.
[1134] 67. The method of any one of paragraphs 57-66, wherein the domain comprising an RNA-dependent DNA polymerase activity is a reverse transcriptase comprising any one of the amino acid sequences of SEQ ID NO: 89-100, 105-122, 128-129, 132, 139, 143, 149, 154, 159, 235, 454, 471, 516, 662, 700, 701-716, 739-741, and 766.
[1135] 68. The method of any one of paragraphs 57-66, wherein the domain comprising an RNA-dependent DNA polymerase activity is a reverse transcriptase comprising an amino acid sequence having at least 80%, 85%, 90%, 95%, 98%, or 99% sequence identity with the amino acid sequence of any one of SEQ ID NOs: 89-100, 105-122, 128-129, 132, 139, 143, 149, 154, 159, 235, 454, 471, 516, 662, 700, 701-716, 739-741, and 766.
[1136] 69. The method of paragraph 68, wherein the reverse transcriptase is a Moloney-Murine Leukemia Virus reverse transcriptase (M-MLVRT).
[1137] 70. The method of paragraph 69, wherein the RNA-dependent DNA polymerase domain comprises a variant Moloney-Murine Leukemia Virus reverse transcriptase (M-MLV RT) domain, wherein the variant M-MLV RT domain comprises one or more of the following mutations: P51X, S67X, E69X, L139X, T197X, D200X, H204X, F209X, E302X, T306X, F309X, W313X, T330X, L345X, L435X, N454X, D524X, E562X, D583X, H594X, L603X, E607X, or D653X relative to the amino acid sequence of SEQ ID NO: 89, and wherein X is any amino acid.
[1138] 71. The method of paragraph 70, wherein the variant M-MLV RT domain comprises one or more of the following mutations: P51L, S67K, E69K, L139P, T197A, D200N, H204R, F209N, E302K, E302R, T306K, F309N, W313F, T330P, L345G, L435G, N454K, D524G, E562Q, D583N, H594Q, L603W, E607K, or D653N relative to the amino acid sequence of SEQ ID NO: 89.
[1139] 72. The method of paragraph 70, wherein the variant M-MLV RT domain comprises an amino acid substitutions D200N, T330P and L603W relative to the amino acid sequence of SEQ ID NO: 89, optionally wherein the M-MLV RT domain comprises amino acid substitutions D200N, T306K, W313F, T330P, and L603W relative to the amino acid sequence of SEQ ID NO: 89.
[1140] 73. The method of any one of paragraphs 57-66, wherein the domain comprising an RNA-dependent DNA polymerase activity is a naturally-occurring reverse transcriptase from a retrovirus or a retrotransposon.
[1141] 74. A method for installing a nucleotide edit in a double stranded target DNA sequence, the method comprising: contacting the double stranded target DNA sequence with a prime editor comprising a nucleic acid programmable DNA binding protein (napDNAbp), a DNA polymerase, and a prime editing guide RNA (PEgRNA), wherein the PEgRNA comprises:
[1142] (a) a spacer sequence that comprises a region of complementarity that hybridizes to a target strand of a double-stranded target DNA sequence;
[1143] (b) a nucleic acid extension arm comprising a DNA synthesis template and a primer binding site.
[1144] (c) a gRNA core that associates with a nucleic acid programmable DNA binding protein (napDNAbp),
[1145] (d) a nucleic acid moiety selected from the group consisting of a toe-loop, hairpin, stem-loop, pseudoknot, aptamer, G-quadraplex, tRNA, riboswitch, or ribozyme; and
[1146] (e) a linker that links the nucleic acid moiety to another component of the PEgRNA wherein the primer binding site comprises a region of complementarity to a non-target strand of the double-stranded target DNA sequence; wherein the DNA synthesis template comprises a region of complementarity to the non-target strand of the double-stranded target DNA sequence and comprises one or more nucleotide edits compared to the double-stranded target DNA sequence and wherein the linker is designed by a computational model. PEgRNA.
[1147] 75. The PEgRNA of paragraph 75, wherein the linker comprises a nucleotide sequence selected from the group consisting of SEQ ID NO: 3960, SEQ ID NO: 3961. SEQ ID NO: 3962. SEQ ID NO: 3963, SEQ ID NO: 3964. SEQ ID NO: 3965, SEQ ID NO: 3966. SEQ ID NO: 3967. SEQ ID NO: 3968, SEQ ID NO: 3969. SEQ ID NO: 3970, and SEQ ID NO: 3971.
[1148] 76. A method for identifying at least one nucleic acid linker for linking a component of a prime editing guide RNA (PEgRNA) to a nucleic acid moiety, the method comprising:
[1149] using at least one computer hardware processor to perform:
[1150] generating a plurality of nucleic acid linker candidates including a first nucleic acid linker candidate;
[1151] identifying the at least one nucleic acid linker from among the plurality of nucleic acid linker candidates at least in part by:
[1152] calculating multiple scores for each of at least some of the plurality of nucleic acid linker candidates, the calculating comprising calculating a first set of scores for the first nucleic acid linker candidate, the first set of scores comprising:
[1153] a first score indicative of a degree of interaction between the first nucleic acid linker candidate and a first region of the PEgRNA;
[1154] a second score indicative of a degree of interaction between the first nucleic acid linker candidate and a second region of the PEgRNA; and
[1155] identifying the at least one nucleic acid linker from among the at least some of the plurality of nucleic acid linker candidates using the calculated multiple scores; and outputting information indicative of the at least one nucleic acid linker.
[1156] 77. The method of paragraph 77, wherein the first score is indicative of a degree to which the first nucleic acid linker candidate is predicted to avoid interaction with the first region of the PEgRNA, and wherein the second score is indicative of a degree to which the first nucleic acid linker candidate is predicted to avoid interaction with the second region of the PEgRNA.
[1157] 78. The method of paragraph 78, wherein the first region comprises a primer binding site (PBS) of the PEgRNA.
[1158] 79. The method of paragraph 79, wherein the second region comprises a spacer of the PEgRNA.
[1159] 80. The method of paragraph 78, wherein the first set of scores further comprises a third score indicative of a degree to which the first nucleic acid linker candidate is predicted to avoid interaction with a third region of the PEgRNA and a fourth score indicative of a degree to which the first nucleic acid linker candidate is predicted to avoid interaction with a fourth region of the PEgRNA.
[1160] 81. The method of paragraph 81, wherein the third region comprises a DNA synthesis template.
[1161] 82. The method of paragraph 82, wherein the fourth region comprises a gRNA core that interacts with a nucleic acid programmable DNA binding protein (napDNAbp).
[1162] 83. The method of paragraph 81, wherein the PEgRNA is for installing a nucleotide edit in a double stranded target DNA sequence,
[1163] wherein the PEgRNA comprises:
[1164] a spacer sequence that comprises a region of complementarity that hybridizes to a target strand of a double-stranded target DNA sequence,
[1165] a nucleic acid extension arm comprising a DNA synthesis template and a primer binding site, and
[1166] a gRNA core that interacts with a nucleic acid programmable DNA binding protein napDNAbp.
[1167] wherein the primer binding site comprises a region of complementarity to a non-target strand of the double-stranded target DNA sequence;
[1168] wherein the DNA synthesis template comprises a region of complementarity to the non-target strand of the double-stranded target DNA sequence and comprises one or more nucleotide edits compared to the double-stranded target DNA sequence and wherein the first region comprises the PBS, the second region comprises the spacer, the third region comprises the DNA synthesis template, and the fourth region comprises the gRNA core.
[1169] 84. The method of paragraph 77, wherein the plurality of nucleic acid linker candidates comprises a second nucleic acid linker candidate, and wherein identifying the at least one nucleic acid linker from among the at least some of the plurality of nucleic acid linker candidates using the calculated multiple scores comprises: comparing the first set of scores for the first nucleic acid linker candidate with a second set of scores for the second nucleic acid linker candidate.
[1170] 85. The method of paragraph 85, wherein:
[1171] the first region comprises a primer binding site (PBS), the first score in the first set of scores is indicative of a degree to which the first nucleic acid linker candidate is predicted to avoid interaction with the first region of the PEgRNA, a third score in the second set of scores is indicative of a degree to which the second nucleic acid linker candidate is predicted to avoid interaction with the first region of the PEgRNA, and comparing the first set of scores with the second set of scores comprises: comparing the first score with the third score.
[1172] 86. The method of paragraph 86, wherein when the first score is equal to or is within a threshold distance of the third score, comparing the first set of scores with the second set of scores further comprises: comparing a score, other than the first score, in the first set of scores with another score, other than the third score, in the second set of scores.

[1173] The present disclosure also provides the following numbered embodiments.
[1174] 1. A method for editing two or more copies of a disease-associated gene, wherein each copy of the disease-associated gene comprises a double stranded target DNA sequence, the method comprising contacting each of the two or more copies of the disease-associated gene with a prime editor system comprising:
[1175] (a) a nucleic acid programmable DNA binding protein (napDNAbp) domain or a polynucleotide encoding the napDNAbp domain;
[1176] (b) a polymerase domain or a polynucleotide encoding the polymerase domain; and
[1177] (c) a prime editing guide RNA (PEgRNA), wherein the PEgRNA comprises:
[1178] a spacer that comprises a region of complementarity to a target strand of the double stranded DNA sequence;
[1179] a gRNA core that associates with the napDNAbp domain; and
   [1180] a nucleic acid extension arm comprising a primer binding site and a DNA synthesis template, wherein the primer binding site comprises a region of complementarity to a non-target strand of the double-stranded target DNA sequence, and wherein the DNA synthesis template comprises a region of complementarity to the non-target strand of the double-stranded target DNA sequence and comprises one or more nucleotide edits compared to the double-stranded target DNA, wherein the non-target strand is complementary to the target strand;
[1181] wherein each copy of the disease-associated gene comprises a pathogenic variant and the two or more copies of the disease-associated gene comprise two or more different pathogenic variants, wherein the contacting installs the one or more nucleotide edits in each of the two or more copies of the disease-associated gene, wherein the installation corrects the pathogenic variant in each of the disease-associated genes, thereby editing each of the two or more copies of the disease-associated gene.
[1182] 2. The method of embodiment 1, wherein the two or more copies of the disease-associated gene are in one subject.
[1183] 3. The method of embodiment 1, wherein the two or more copies of the disease-associated gene are in two or more different subjects.
[1184] 4. A method for treating a disease in two or more subjects each comprising a disease-associated gene, wherein the disease-associated gene in of the two or more subjects comprises a double stranded target DNA sequence, the method comprising administering to the two or more subjects a prime editor system comprising:
[1185] (a) a nucleic acid programmable DNA binding protein (napDNAbp) domain or a polynucleotide encoding the napDNAbp domain;
[1186] (b) a polymerase domain or a polynucleotide encoding the polymerase domain; and
[1187] (c) a prime editing guide RNA (PEgRNA), wherein the PEgRNA comprises:
   [1188] (i) a spacer that comprises a region of complementarity to a target strand of the double stranded DNA sequence;
   [1189] (ii) a gRNA core that associates with the napDNAbp domain; and
   [1190] (iii) a nucleic acid extension arm comprising a primer binding site and a DNA synthesis template, wherein the primer binding site comprises a region of complementarity to a non-target strand of the double-stranded target DNA sequence, and wherein the DNA synthesis template comprises a region of complementarity to the non-target strand of the double-stranded target DNA sequence and comprises one or more nucleotide edits compared to the double-stranded target DNA, wherein the non-target strand is complementary to the target strand;
[1191] wherein the two or more subjects comprise two or more different pathogenic variants in the disease associated gene, wherein the administration installs the one or more nucleotide edits in the disease associated gene in each of the two or more subjects, wherein the installation corrects the pathogenic variant in the disease-associated gene in each of the two or more subjects, thereby treating the disease in the two or more subjects.
[1192] 5. The method of any one of embodiments 1-4, wherein the polynucleotide encoding the napDNAbp domain and/or the polynucleotide encoding the polymerase domain comprises RNA, optionally wherein the polynucleotide encoding the napDNAbp domain and/or the polynucleotide encoding the polymerase domain is mRNA.
[1193] 6. The method of any one of embodiments 1-5, wherein the polymerase domain is an RNA-dependent DNA polymerase domain.
[1194] 7. The method of embodiment 6, wherein the polymerase domain is a reverse transcriptase, optionally wherein the reverse transcriptase is a reverse transcriptase from a retrovirus or a retrotransposon.
[1195] 8. The method of embodiment 6, wherein the reverse transcriptase has at least 80%, 85%, 90%, 95%, 98%, or 99% sequence identity with the amino acid sequence of any one of 89-100, 105-122, 128-129, 132, 139, 143, 149, 154, 159, 235, 454, 471, 516, 662, 700, 701-716, 739-741, and 766.
[1196] 9. The method of embodiment 6, wherein the reverse transcriptase is a Moloney-Murine Leukemia Virus reverse transcriptase (M-MLVRT).
[1197] 10. The method of embodiment 9, wherein the RNA-dependent DNA polymerase domain comprises a variant Moloney-Murine Leukemia Virus reverse transcriptase (M-MLV RT) domain, wherein the variant M-MLV RT domain comprises one or more of the following mutations: P51X, S67X, E69X, L139X, T197X, D200X, H204X, F209X, E302X, T306X, F309X, W313X, T330X, L345X, L435X, N454X, D524X, E562X, D583X, H594X, L603X, E607X, or D653X relative to the amino acid sequence of SEQ ID NO: 89, and wherein X is any amino acid.
[1198] 11. The method of embodiment 9, wherein the variant M-MLV RT domain comprises one or more of the following mutations: P51L, S67K, E69K, L139P, T197A, D200N, H204R, F209N, E302K, E302R, T306K, F309N, W313F, T330P, L345G, L435G, N454K, D524G, E562Q, D583N, H594Q, L603W, E607K, or D653N relative to the amino acid sequence of SEQ ID NO: 89.
[1199] 12. The method of embodiment 11, wherein the variant M-MLV RT domain comprises an amino acid substitutions D200N, T330P and L603W relative to the amino acid sequence of SEQ ID NO: 89.
[1200] 13. The method of embodiment 11, wherein the M-MLV RT domain comprises amino acid substitutions D200N, T306K, W313F, T330P, and L603W relative to the amino acid sequence of SEQ ID NO: 89.
[1201] 14. The method of embodiment 11, wherein the variant M-MLV RT domain comprises any one of the amino acid sequence of SEQ ID NOs: 106-122, 143, 701-716, or 740-741.
[1202] 15. The method of embodiment 11, wherein the M-MLV RT domain has the sequence of SEQ ID NO: 741.
[1203] 16. The method of embodiment 9, wherein the variant M-MLV RT domain is a truncated variant of M-MLV RT that contains D200N, T306K, W313F, and T330P mutations.
[1204] 17. The method of embodiment 16, wherein the variant M-MLV RT domain has the sequence of SEQ ID NO: 766.
[1205] 18. The method of any one of embodiments 1-4, wherein the napDNAbp domain has a nickase activity.
[1206] 19. The method of any one of embodiments 1-4, wherein the napDNAbp domain is selected from the group consisting of: Cas9, Cas12e, Cas12d, Cas12a, Cas12b1, Cas13a, Cas12c, and Argonaute and optionally has a nickase activity.
[1207] 20. The method of any one of embodiments 1-4, wherein the napDNAbp domain is a Cas9 protein or variant thereof.
[1208] 21. The method of embodiment 20, wherein the napDNAbp domain is a nuclease active Cas9, a nuclease inactive Cas9 (dCas9), or a Cas9 nickase (nCas9).
[1209] 22. The method of embodiment 21, wherein the napDNAbp domain is Cas9 nickase (nCas9).
[1210] 23. The prime editor of any one of embodiments 1-4, wherein the napDNAbp domain comprises an amino acid sequence having at least 80%, 85%, 90%, 95%, 98%, or 99% sequence identity with the amino acid sequence of any one of SEQ ID NOs: 18, 19, 21, 25, 26, 126, 137, 141, 147, 153, 157, 445, 460, 467, and 482-487.
[1211] 24. The method of embodiment 23, wherein the napDNAbp domain comprises an amino acid sequence having at least 80%, 85%, 90%, 95%, 98%, or 99% sequence identity with the amino acid sequence to SEQ ID NO: 18.
[1212] 25. The method of any one of embodiments 1-24, wherein the napDNAbp domain and the RNA-dependent DNA polymerase domain are connected to form a fusion protein.
[1213] 26. The method of embodiment 25, wherein the napDNAbp domain and the RNA-dependent DNA polymerase domain are connected via a peptide linker to form the fusion protein.
[1214] 27. The method of embodiment 25 or 26, wherein the fusion protein comprises the structure NH2-[napDNAbp domain]-[RNA-dependent DNA polymerase domain]-COOH, or NH2-[RNA-dependent DNA polymerase domain]-[napDNAbp domain]-COOH, wherein each instance of “]-[” indicates the presence of an optional linker sequence.
[1215] 28. The method of embodiment 26 or 27, wherein the peptide linker comprises an amino acid sequence selected from SGGS, (2×SGGS), (3×SGGS), XTEN, EAAAK, (2×EAAAK), and (3×EAAAK).
[1216] 29. The method of embodiment 28, wherein the peptide linker consists of the amino acid sequence of 1×XTEN.
[1217] 30. The method of embodiment 25, wherein the fusion protein comprises the amino acid sequence of SEQ ID NO:134, or an amino acid sequence having at least 80% sequence identity with the amino acid sequence of SEQ ID NO: 134.
[1218] 31. The method of any one of embodiments 1-30, wherein the nick site is within a protospacer on the non-target strand of the double stranded target DNA, wherein the protospacer is directly adjacent to a protospacer adjacent motif (PAM).
[1219] 32. The method of any one of embodiments 1-31, wherein the spacer, the nucleic acid extension arm, and the gRNA core are in a single molecule.
[1220] 33. The method of embodiment 32, wherein the nucleic acid extension arm is positioned at the 3′ or 5′ end of the gRNA core, or at an intramolecular position in the gRNA core, and optionally wherein the nucleic acid extension arm comprises DNA or RNA.
[1221] 34. The method of embodiment 32, wherein the nucleic acid extension arm is at least 5 nucleotides, at least 6 nucleotides, at least 7 nucleotides, at least 8 nucleotides, at least 9 nucleotides, at least 10 nucleotides, at least 11 nucleotides, at least 12 nucleotides, at least 13 nucleotides, at least 14 nucleotides, at least 15 nucleotides, at least 16 nucleotides, at least 17 nucleotides, at least 18 nucleotides, at least 19 nucleotides, at least 20 nucleotides, at least 21 nucleotides, at least 22 nucleotides, at least 23 nucleotides, at least 24 nucleotides, at least 25 nucleotides, at least 26 nucleotides, at least 27 nucleotides, at least 28 nucleotides, at least 29 nucleotides, at least 30 nucleotides, at least 31 nucleotides, at least 32 nucleotides, at least 33 nucleotides, at least 34 nucleotides, at least 35 nucleotides, at least 36 nucleotides, at least 37 nucleotides, at least 38 nucleotides, at least 39 nucleotides, at least 40 nucleotides, at least 41 nucleotides, at least 42 nucleotides, at least 43 nucleotides, at least 44 nucleotides, at least 45 nucleotides, at least 46 nucleotides, at least 47 nucleotides, at least 48 nucleotides, at least 49 nucleotides, or at least 50 nucleotides, optionally wherein the nucleic acid extension arm is 10 10 to 20, 20 to 30, 30 to 40, 40 to 50, 50 to 60, 60 to 70, 70 to 80, 80 to 90, 90 to 100, 100 to 110, 110 to 120.20 to 120, 40 to 120, 60 to 120, 80 to 120, 100 to 120, 40 to 100, 60 to 100, 80 to 100, or 60 to 80 nucleotides in length.
[1222] 35. The method of embodiment 32, wherein the primer binding site is at least 3 nucleotides, at least 4 nucleotides, at least 5 nucleotides, at least 6 nucleotides, at least 7 nucleotides, at least 8 nucleotides, at least 9 nucleotides, at least 10 nucleotides, at least 11 nucleotides, at least 12 nucleotides, at least 13 nucleotides, at least 14 nucleotides, or at least 15 nucleotides in length, optionally wherein the primer binding site is 1 to 10 nucleotides, 5 to 10 nucleotides, 10 to 15 nucleotides, 10 to 20 nucleotides, 8 to 20 nucleotides, 15 to 25 nucleotides, 20 to 30 nucleotides, or 25 to 30 nucleotides in length.
[1223] 36. The method of embodiment 35, wherein the primer binding site is from 8 nucleotides to 15 nucleotides in length.
[1224] 37. The method of embodiment 32, wherein the primer binding site is from (a) 8 nucleotides to 11 nucleotides in length, and contains greater than about 60% GC content, (b) 12 nucleotides to 13 nucleotides in length, and comprises about 40-60% GC content, or (c) 14 nucleotides to 15 nucleotides in length, and contains less than about 40% GC content.
[1225] 38. The method of embodiment 32, wherein the DNA synthesis template is a reverse transcription template sequence.
[1226] 39. The method of any one of embodiments 1-38, wherein the DNA synthesis template has a wild type sequence of the disease associated gene.
[1227] 40. The method of any one of embodiments 1-39, wherein the DNA synthesis template is at least 3 nucleotides, at least 4 nucleotides, at least 5 nucleotides, at least 6 nucleotides, at least 7 nucleotides, at least 8 nucleotides, at least 9 nucleotides, at least 10 nucleotides, at least 11 nucleotides, at least 12 nucleotides, at least 13 nucleotides, at least 14 nucleotides, or at least 15 nucleotides in length.
[1228] 41. The method of any one of embodiments 1-39, wherein the DNA synthesis template is 5 to 10, 5 to 15, 10 to 20, 20 to 30, 30 to 40, 40 to 50, 50 to 60, 60 to 70, 70 to 80, 80 to 90, 90 to 100, 10 to 30, 10 to 40, 10 to 50, 10 to 60, 20 to 40, 20 to 60, 30 to 100, 40 to 100, 50 to 100, 60 to 100, or 70 to 100 nucleotides in length, optionally wherein the DNA synthesis template is 10 to 35 nucleotides in length.
[1229] 42. The method of any one of embodiments 1-39, wherein the DNA synthesis template is at least 3 to 58 nucleotides in length.
[1230] 43. The method of any one of embodiments 1-39, wherein the DNA synthesis template is from 8 nucleotides to 31 nucleotides in length.
[1231] 44. The method of any one of embodiments 1-39, wherein the DNA synthesis template is from (a) 10 nucleotides to 16 nucleotides in length or (b) 12 nucleotides to 17 nucleotides in length.
[1232] 45. The method of embodiment of any one of embodiments 1-39, wherein the DNA synthesis template comprises a nucleotide sequence that is 80%, or 85%, or 90%, or 95%, or 99% identical to the double stranded target DNA sequence.
[1233] 46. The method of any one of embodiments 1-45, wherein the PEgRNA further comprises at least one nucleic acid moiety selected from the group consisting of a toe-loop, hairpin, stem-loop, pseudoknot, aptamer. G-quadraplex, tRNA, riboswitch, or ribozyme.
[1234] 47. The method of embodiment 46, wherein the nucleic acid moiety is located at the 3′ or 5′ end of the PEgRNA.
[1235] 48. The method of embodiment 46, wherein the extension arm comprises the nucleic acid moiety.
[1236] 49. The method of embodiment 48, wherein the nucleic acid moiety is located at the 3′ or 5′ end of the extension arm.
[1237] 50. The method of embodiment 46, wherein the nucleic acid moiety comprises a frameshifting pseudoknot from a Moloney murine leukemia virus (M-MLV) genome (a Mpknot), optionally wherein the Mpknot is a Mpknot1 moiety having a nucleotide sequence selected from the group consisting of: SEQ ID NO: 3930 (Mpknot1), SEQ ID NO: 3931 (Mpknot1 3′ trimmed), SEQ ID NO: 3932 (Mpknot1 with 5′ extra). SEQ ID NO: 3933 (Mpknot1 U38A), SEQ ID NO: 3934 (Mpknot1 U38A A29C). SEQ ID NO: 3935 (MMLC A29C), SEQ ID NO: 3936 (Mpknot1 with 5′ extra and U38A). SEQ ID NO: 3937 (Mpknot1 with 5′ extra and U38A A29C), and SEQ ID NO: 3938 (Mpknot1 with 5′ extra and A29C), or a nucleotide sequence having at least 80% sequence identity therewith.
[1238] 51. The method of embodiment 46, wherein the nucleic acid moiety comprises a G-quadruplex, optionally wherein the G-quadruplex has a nucleotide sequence selected from the group consisting of: SEQ ID NO: 3939 (tns1), SEQ ID NO: 3940 (stk40), SEQ ID NO: 3941 (apc2), SEQ ID NO: 3942 (ceacam4), SEQ ID NO: 3943 (pitpnm3), SEQ ID NO: 3944 (rlf), SEQ ID NO: 3945 (erc1). SEQ ID NO: 3946 (ube3c). SEQ ID NO: 3947 (taf15). SEQ ID NO: 3948 (stard3), and SEQ ID NO: 3949 (g2), or a nucleotide sequence having at least 80% sequence identity therewith.
[1239] 52. The method of embodiment 46, wherein the nucleic acid moiety comprises a prequeosine 1 riboswitch aptamer, optionally wherein the nucleic acid moiety comprises an evolved prequeosine1-1 riboswitch aptamer (evopreQ1 comprising a nucleotide sequence selected from the group consisting of: SEQ ID NO: 3950 (evopreq1). SEQ ID NO: 3951 (evopreq1motif1), SEQ ID NO: 3952 (evopreq1motif2), SEQ ID NO: 3953 (evopreq1motif3), SEQ ID NO: 3954 (shorter preg1-1), SEQ ID NO: 3955 (preq1-1 G5C (mut1)), and SEQ ID NO: 3956 (preq1-1 G15C (mut2)), or a nucleotide sequence having at least 80% sequence identity therewith.
[1240] 53. The method of embodiment 46, wherein the nucleic acid moiety comprises a tRNA moiety having a nucleotide sequence of SEQ ID NO: 3957, or a nucleotide sequence having at least 80% sequence identity therewith.
[1241] 54. The method of embodiment 46, wherein the nucleic acid moiety has a nucleotide sequence of SEQ ID NO: 3958 (xrn1), or a nucleotide sequence having at least 80% sequence identity therewith.
[1242] 55. The method of embodiment 46, wherein the nucleic acid moiety comprises a P4-P6 domain of a group I intron, optionally wherein the P4-P6 domain has a nucleotide sequence of SEQ ID NO: 3959, or a nucleotide sequence having at least 80% sequence identity therewith.
[1243] 56. The method of any of embodiments 46-55, wherein the PEgRNA further comprises a linker.
[1244] 57. The method of embodiment 56, wherein the linker is between the nucleic acid moiety and another component of the PEgRNA.
[1245] 58. The method of embodiment 57, wherein the linker is between the nucleic acid moiety and the primer binding site or between the gRNA core and the nucleic acid moiety.
[1246] 59. The method of embodiment 58, wherein the linker comprises a nucleotide sequence selected from the group consisting of SEQ ID NO: 3960, SEQ ID NO: 3961. SEQ ID NO: 3962, SEQ ID NO: 3963, SEQ ID NO: 3964. SEQ ID NO: 3965, SEQ ID NO: 3966. SEQ ID NO: 3967. SEQ ID NO: 3968, SEQ ID NO: 3969. SEQ ID NO: 3970, and SEQ ID NO: 3971.
[1247] 60. The method of any one of embodiments 1-59, wherein the one or more nucleotide edits comprises an insertion of one or more nucleotides as compared to the double-stranded DNA sequence.
[1248] 61. The method of any one of embodiments 1-59, wherein the one or more nucleotide edits comprises a deletion of one or more nucleotides as compared to the double-stranded DNA sequence.
[1249] 62. The method of any one of embodiments 1-59, wherein the one or more nucleotide edits comprises a nucleotide substitution as compared to the double-stranded DNA sequence.
[1250] 63. The method of any one of embodiments 1-59, wherein the wherein the one or more nucleotide edits comprises one or more insertions of one or more nucleotides, nucleotide substitutions, deletions of one or more nucleotides, or a combination of any such nucleotide edits as compared to the double-stranded target DNA sequence.
[1251] 64. The method of any one of embodiments 62-63, wherein the one or more nucleotide substitutions are single-base nucleotide substitutions.
[1252] 65. The method of any one of embodiments 2-65, wherein the administration corrects 2, 3, 4, 5, 6, 7, 8, 9, 10, 11, 12, 13, 14, 15, 16, 17, 18, 19 or 20 pathogenic variants in the disease-associated gene in the two or more subjects; or wherein the administration corrects 2 to 5, 2 to 7, 3 to 10, 3 to 12, 4 to 15, or 4 to 20 pathogenic variants in the disease-associated gene in the two or more subjects.
[1253] 66. The method of any one of embodiments 1-63, wherein the PEgRNA comprises a modified nucleobase, a modified sugar, a modified phosphate group, or a nucleoside analog.
[1254] 67. The method of embodiment 4-64, comprising administering to the two or more subjects a pharmaceutical composition comprising the method and a pharmaceutically acceptable excipient.
[1255] 68. The method of any one of embodiments 1-65, wherein the disease associated gene is CDKL5.
[1256] 69. The method of embodiment 66, wherein each of the different pathogenic variants encodes a mutation selected from the group consisting of V1721, A173D, R175S, W176G, W176R, Y177C, R178P, P180L, E181A, and L182P as compared to a wild type CDKL5 protein.
[1257] 70. The method of embodiment 66, wherein the PEgRNA comprises the sequence of PEgRNA sequence in FIG. 2.
[1258] 71. The method of embodiment 66, wherein the PEgRNA comprises the sequence of PEgRNA sequence in FIG. 4.

### EXAMPLES

### Example 1: Prime Editing: Highly Versatile and Precise Search-and-Replace Genome Editing in Human Cells without Double-Stranded DNA Breaks

### Background

[1259] Current genome editing methods can disrupt, delete, or insert target genes with accompanying byproducts of double-stranded DNA breaks using programmable nucleases, and install the four transition point mutations at target loci using base editors. Small insertions, small deletions, and the eight transversion point mutations, however, collectively represent most pathogenic genetic variants but cannot be corrected efficiently and without an excess of byproducts in most cell types. Described herein is prime editing, a highly versatile and precise genome editing method that directly writes new genetic information into a specified DNA site using a catalytically impaired Cas9 fused to an engineered reverse transcriptase, programmed with an engineered prime editing guide RNA (pegRNA) that both specifies the target site and encodes the desired edit. Greater than 175 distinct edits in human cells were performed to establish that prime editing can make targeted insertions, deletions, all 12 possible types of point mutations, and combinations thereof efficiently (typically 20-60%, up to 77% in unsorted cells) and with low byproducts (typically 1-10%), without requiring double-stranded breaks or donor DNA templates. Prime editing was applied in human cells to correct the primary genetic causes of sickle cell disease (requiring an A•T-to-T•A transversion in HBB) and Tay-Sachs disease (requiring a 4-base deletion in HEXA), in both cases efficiently reverting the pathogenic genomic alleles to wild-type with minimal byproducts. Prime editing was also used to create human cell lines with these pathogenic HBB transversion and HEXA insertion mutations, to install the G127V mutation in PRNP that confers resistance to prion disease (requiring a G•C-to-T•A transversion), and to efficiently insert a His6 tag, a FLAG epitope tag, and an extended LoxP site into target loci in human cells. Prime editing offers efficiency and product purity advantages over HDR, and complementary strengths and weaknesses compared to base editing. Consistent with its search-and-replace mechanism, which requires three distinct base-pairing events, prime editing is much less prone to off-target DNA modification at known Cas9 off-target sites than Cas9. Prime editing substantially expands the scope and capabilities of genome editing, and in principle can correct ˜89% of known pathogenic human genetic variants.

[1260] The ability to make virtually any targeted change in the genome of any living cell or organism is a longstanding aspiration of the life sciences. Despite rapid advances in genome editing technologies, the majority of the >75,000 known human genetic variants associated with diseases¹¹¹ cannot be corrected or installed in most therapeutically relevant cells (FIG. 38A). Programmable nucleases such as CRISPR-Cas9 make double-stranded DNA breaks (DSBs) that can disrupt genes by inducing mixtures of insertions and deletions (indels) at target sites¹¹²⁻¹¹⁴. Nucleases can also be used to delete target genes^{115,116}, or insert exogenous genes¹¹⁷⁻¹¹⁹, through homology-independent processes. Double-stranded DNA breaks, however, are also associated with undesired outcomes including complex mixtures of products, translocations¹²⁰, and p53 activation^{121,122}. Moreover, the vast majority of pathogenic alleles differ from their non-pathogenic counterparts by small insertions, deletions, or base substitutions that require much more precise editing technologies to correct (FIG. 38A). Homology-directed repair (HDR) stimulated by nuclease-induced DSBs¹²³ has been widely used to install a variety of precise DNA changes. HDR, however, relies on exogenous donor DNA repair templates, typically generates an excess of indel byproducts from end-joining repair of DSBs, and is inefficient in most therapeutically relevant cell types (T cells and some stem cells being important exceptions)^{124,125}. While enhancing the efficiency and precision of DSB-mediated genome editing remains the focus of promising efforts¹²⁶⁻¹³⁰, these challenges necessitate the exploration of alternative precision genome editing strategies.

[1261] Base editing can efficiently install or correct the four types of transition mutations (C to T, G to A, A to G, and T to C) without requiring DSBs in a wide variety of cell types and organisms, including mammals¹²⁸⁻¹³¹, but cannot currently achieve any of the eight transversion mutations (C to A, C to G, G to C, G to T, A to C, A to T, T to A, and T to G), such as the T•A-to-A•T mutation needed to directly correct the most common cause of sickle cell disease (HBB E6V)¹³². In addition, no DSB-free method has been reported to perform target deletions, such as the removal of the 4-base duplication that causes Tay-Sachs disease (HEXA 1278+TATC)¹³, or targeted insertions, such as the precise 3-base insertion required to directly correct the most common cause of cystic fibrosis (CFTR AF508)¹³⁴. Targeted transversion point mutations, insertions, and deletions thus are difficult to install or correct efficiently and without excess byproducts in most cell types, even though they collectively account for most known pathogenic alleles (FIG. 38A).

[1262] Described herein is the development of prime editing, a new “search-and-replace” genome editing technology that mediates targeted insertions, deletions, and all 12 possible base-to-base conversions at targeted loci in human cells without requiring double-stranded DNA breaks, or donor DNA templates. Prime editors, initially exemplified by PE1, use a reverse transcriptase fused to a programmable nickase and a prime editing pegRNA (pegRNA) to directly copy genetic information from the extension on the pegRNA into the target genomic locus. A second-generation prime editor (PE2) uses an engineered reverse transcriptase to substantially increase editing efficiencies with minimal (typically <2%) indel formation, while a third-generation PE3 system adds a second guide RNA to nick the non-edited strand, thereby favoring replacement of the non-edited strand and further increasing editing efficiency, typically, to about 20-50% in human cells with about 1-10% indel formation. PE3 offers far fewer byproducts and higher or similar efficiency compared to optimized Cas9 nuclease-initiated HDR, and offers complementary strengths and weaknesses compared to current-generation base editors.

[1263] PE3 was applied at genomic loci in human HEK293T cells to achieve efficient conversion of HBB E6V to wild-type HBB, deletion of the inserted TATC to restore HEXA 1278+TATC to wild-type HEXA, installation in PRNP of the G127V mutation that confers resistance to prion disease¹³⁵ (requiring a G•C-to-T•A transversion), and targeted insertion of a His6 tag (18 bp), FLAG epitope tag (24 bp), and extended LoxP site for Cre-mediated recombination (44 bp). Prime editing was also successful in three other human cell lines, as well as in post-mitotic primary mouse cortical neurons, with varying efficiencies. Due to a high degree of flexibility in the distance between the initial nick and location of the edit, prime editing is not substantially constrained by the PAM requirement of Cas9 and in principle can target the vast majority of genomic loci. Off-target prime editing is much rarer than off-target Cas9 editing at known Cas9 off-target loci, likely due to the requirement of three distinct DNA base pairing events in order for productive prime editing to take place. By enabling precise targeted insertions, deletions, and all 12 possible classes of point mutations at a wide variety of genomic loci without the need for DSBs or donor DNA templates, prime editing has the potential to advance the study and correction of many gene variants.

### Results

[1264] Strategy for Transferring Information from an pegRNA into a Target DNA Locus

[1265] Cas9 targets DNA using a guide RNA containing a spacer sequence that hybridizes to the target DNA site^{112-114,136,137}. The aim was to engineer guide RNAs to both specify the DNA target as in natural CRISPR systems^{138,139}, and also to contain new genetic information that replaces the corresponding DNA nucleotides at the target locus. The direct transfer of genetic information from an pegRNA into a specified DNA site, followed by replacement of the original unedited DNA, in principle could provide a general means of installing targeted DNA sequence changes in living cells, without dependence on DSBs or donor DNA templates. To achieve this direct information transfer, the aim was to use genomic DNA, nicked at the target site to expose a 3′-hydroxyl group, to prime the reverse transcription of the genetic information from an extension on the engineered guide RNA (hereafter referred to as the prime editing guide RNA, or pegRNA) directly into the target site (FIG. 38A).

[1266] These initial steps of nicking and reverse transcription, which resemble mechanisms used by some natural mobile genetic elements¹⁴⁰ result in a branched intermediate with two redundant single-stranded DNA flaps on one strand: a 5′ flap that contains the unedited DNA sequence, and a 3′ flap that contains the edited sequence copied from the pegRNA (FIG. 38B). To achieve a successful edit, this branched intermediate must be resolved so that the edited 3′ flap replaces the unedited 5′ flap. While hybridization of the 5′ flap with the unedited strand is likely to be thermodynamically favored since the edited 3′ flap can make fewer base pairs with the unedited strand, 5′ flaps are the preferred substrate for structure-specific endonucleases such as FEN¹¹⁴¹ which excises 5′ flaps generated during lagging-strand DNA synthesis and long-patch base excision repair. It was reasoned that preferential 5′ flap excision and 3′ flap ligation could drive the incorporation of the edited DNA strand, creating heteroduplex DNA containing one edited strand and one unedited strand (FIG. 38B).

[1267] Permanent installation of the edit could arise from subsequent DNA repair that resolves the mismatch between the two DNA strands in a manner that copies the information in the edited strand to the complementary DNA strand (FIG. 38C). Based on a similar strategy developed to maximize the efficiency of DNA base editing¹³¹⁻¹³³ it was envisioned that nicking the non-edited DNA strand, far enough from the site of the initial nick to minimize double-strand break formation, might bias DNA repair to preferentially replace the non-edited strand.

### Validation of Prime Editing Steps In Vitro and in Yeast Cells

[1268] Following cleavage of the PAM-containing DNA strand by the RuvC nuclease domain of Cas9, the PAM-distal fragment of this strand can dissociate from otherwise stable Cas9:sgRNA:DNA complexes¹⁴³. The 3′ end of this liberated strand can be sufficiently accessible to prime DNA polymerization. Guide RNA engineering efforts¹⁴⁴⁻¹⁴⁶ and crystal structures of Cas9:sgRNA:DNA complexes¹⁴⁷⁻¹⁴⁹ suggest that the 5′ and 3′ termini of the sgRNA can be extended without abolishing Cas9:sgRNA activity. pegRNAs were designed by extending sgRNAs to include two critical components: a primer binding site (PBS) that allows the 3′ end of the nicked DNA strand to hybridize to the pegRNA, and a reverse transcriptase (RT) template containing the desired edit that would be directly copied into the genomic DNA site as the 3′ end of the nicked DNA strand is extended across the RNA template by a polymerase (FIG. 38C).

[1269] These hypotheses were tested in vitro using purified S. pyogenes Cas9 protein. A series of pegRNA candidates were constructed by extending sgRNAs on either terminus with a PBS sequence (5 to 6 nucleotides, nt) and an RT template (7 to 22 nt). It was confirmed that 5′-extended pegRNAs direct Cas9 binding to target DNA, and that both 5′-extended pegRNAs and 3′-extended pegRNAs support Cas9-mediated target nicking in vitro and DNA cleavage activities in mammalian cells (FIGS. 44A-44C). These candidate pegRNA designs were tested using pre-nicked 5′-Cy5-labeled dsDNA substrates, catalytically dead Cas9 (dCas9), and a commercial variant of Moloney murine leukemia virus (M-MLV) reverse transcriptase (FIG. 44D). When all components were present, efficient conversion of the fluorescently labeled DNA strand into longer DNA products with gel mobilities, consistent with reverse transcription along the RT template, (FIG. 38D, FIGS. 44D-44E) was observed. Products of desired length were formed with either 5′-extended or 3′-extended pegRNAs (FIGS. 38D-38E). Omission of dCas9 led to nick translation products derived from reverse transcriptase-mediated DNA polymerization on the DNA template, with no pegRNA information transfer (FIG. 38D). No DNA polymerization products were observed when the pegRNA was replaced by a conventional sgRNA, confirming the necessity of the PBS and RT template components of the pegRNA (FIG. 38D). These results demonstrate that Cas9-mediated DNA melting exposes a single-stranded R-loop that, if nicked, is competent to prime reverse transcription from either a 5′-extended or 3′-extended pegRNA.

[1270] Next, non-nicked dsDNA substrates were tested with a Cas9 nickase (H840A mutant) that exclusively nicks the PAM-containing strand¹¹². In these reactions, 5′-extended pegRNAs generated reverse transcription products inefficiently, possibly due to impaired Cas9 nickase activity (FIG. 44F). However, 3′-extended pegRNAs enabled robust Cas9 nicking and efficient reverse transcription (FIG. 38E). The use of 3′-extended pegRNAs generated only a single apparent product, despite the potential, in principle, for reverse transcription to terminate anywhere within the remainder of the pegRNA. DNA sequencing of the products of reactions with Cas9 nickase, RT, and 3′-extended pegRNAs revealed that the complete RT template sequence was reverse transcribed into the DNA substrate (FIG. 44G). These experiments established that 3′-extended pegRNAs can template the reverse transcription of new DNA strands while retaining the ability to direct Cas9 nickase activity.

[1271] To evaluate the eukaryotic cell DNA repair outcomes of 3′ flaps produced by pegRNA-programmed reverse transcription in vitro, DNA nicking and reverse transcription using pegRNAs, Cas9 nickase, and RT in vitro on reporter plasmid substrates were performed, and the reaction products were then transformed into yeast (S. cerevisiae) cells (FIG. 45A). Encouragingly, when plasmids were edited in vitro with 3′-extended pegRNAs encoding a T•A-to-A•T transversion that corrects the premature stop codon, 37% of yeast transformants expressed both GFP and mCherry proteins (FIG. 38F, FIG. 45C). Consistent with the results in FIG. 38E and FIG. 44F, editing reactions carried out in vitro with 5′-extended pegRNAs yielded fewer GFP and mCherry double-positive colonies (9%) than those with 3′-extended pegRNAs (FIG. 38F and FIG. 45D). Productive editing was also observed using 3′-extended pegRNAs that insert a single nucleotide (15% double-positive transformants) or delete a single nucleotide (29% double-positive transformants) to correct frameshift mutations (FIG. 38F and FIGS. 45E-45F). DNA sequencing of edited plasmids recovered from double-positive yeast colonies confirmed that the encoded transversion edit occurred at the desired sequence position (FIG. 45G). These results demonstrate that DNA repair in eukaryotic cells can resolve 3′ DNA flaps arising from prime editing to incorporate precise DNA edits including transversions, insertions, and deletions.

### Design of Prime Editor 1 (PE1)

[1272] Encouraged by the results in vitro and in yeast, a prime editing system with a minimum number of components capable of editing genomic DNA in mammalian cells was sought for development. 3′-extended pegRNAs (hereafter referred to simply as pegRNAs, FIG. 39A) and direct fusions of Cas9 H840A to reverse transcriptase via a flexible linker can constitute a functional two-component prime editing system. HEK293T (immortalized human embryonic kidney) cells were transfected with one plasmid encoding a fusion of wild-type M-MLV reverse transcriptase to either terminus of Cas9 H840A nickase as well as a second plasmid encoding a pegRNA. Initial attempts led to no detectable T•A-to-A•T conversion at the HEK3 target locus.

[1273] Extension of the PBS in the pegRNA to 8-15 bases (FIG. 39A), however, led to detectable T•A-to-A•T editing at the HEK3 target site (FIG. 39B), with higher efficiencies for prime editor constructs in which the RT was fused to the C-terminus of Cas9 nickase (3.7% maximal T•A-to-A•T conversion with PBS lengths ranging from 8-15 nt) compared to N-terminal RT-Cas9 nickase fusions (1.3% maximal T•A-to-A•T conversion) (FIG. 39B; all mammalian cell data herein reports values for the entire treated cell population, without selection or sorting, unless otherwise specified). These results suggest that wild-type M-MLV RT fused to Cas9 requires longer PBS sequences for genome editing in human cells compared to what is required in vitro using the commercial variant of M-MLV RT supplied in trans. This first-generation wild-type M-MLV reverse transcriptase fused to the C-terminus of Cas9 H840A nickase was designated as PE1.

[1274] The ability of PE1 to precisely introduce transversion point mutations at four additional genomic target sites specified by the pegRNA (FIG. 39C) was tested. Similar to editing at the HEK3 locus, efficiency at these genomic sites was dependent on PBS length, with maximal editing efficiencies ranging from 0.7-5.5% (FIG. 39C). Indels from PE1 were low, averaging 0.2±0.1% for the five sites under conditions that maximized each site's editing efficiency (FIG. 46A). PE1 was also able to install targeted insertions and deletions, exemplified by a single-nucleotide deletion (4.0% efficiency), a single-nucleotide insertion (9.7%), and a three-nucleotide insertion (17%) at the HEK3 locus (FIG. 39C). These results establish the ability of PE1 to directly install targeted transversions, insertions, and deletions without requiring double-stranded DNA breaks or DNA templates.

### Design of Prime Editor 2 (PE2)

[1275] While PE1 can install a variety of edits at several loci in HEK293T cells, editing efficiencies were generally low (typically ≤5%) (FIG. 39C). Engineering the reverse transcriptase in PE1 might improve the efficiency of DNA synthesis within the unique conformational constraints of the prime editing complex, resulting in higher genome editing yields. M-MLV RT mutations have been previously reported that increase enzyme thermostability^{150,151}, processivity¹⁵⁰, and DNA:RNA heteroduplex substrate affinity¹⁵², and that inactivate RNaseH activity¹⁵³. 19 PE1 variants were constructed containing a variety of reverse transcriptase mutations to evaluate their prime editing efficiency in human cells.

[1276] First, a series of M-MLV RT variants that previously emerged from laboratory evolution for their ability to support reverse transcription at elevated temperatures¹⁵⁰ were investigated. Successive introduction of three of these amino acid substitutions (D200N, L603W, and T330P) into M-MLV RT, hereafter referred to as M3, led to a 6.8-fold average increase in transversion and insertion editing efficiency across five genomic loci in HEK293T cells compared to that of PE1 (FIGS. 47A-47S).

[1277] Next, in combination with M3, additional reverse transcriptase mutations that were previously shown to enhance binding to template:PBS complex, enzyme processivity, and thermostability¹⁵² were tested. Among the 14 additional mutants analyzed, a variant with T306K and W313F substitutions, in addition to the M3 mutations, improved editing efficiency an additional 1.3-fold to 3.0-fold compared to M3 for six transversion or insertion edits across five genomic sites in human cells (FIGS. 47A-47S). This pentamutant of M-MLV reverse transcriptase incorporated into the PE1 architecture (Cas9 H840A-M-MLV RT (D200N L603W T330P T306K W313F)) is hereafter referred to as PE2.

[1278] PE2 installs single-nucleotide transversion, insertion, and deletion mutations with substantially higher efficiency than PE1 (FIG. 39C), and is compatible with shorter PBS pegRNA sequences (FIG. 39C), consistent with an enhanced ability to productively engage transient genomic DNA:PBS complexes. On average, PE2 led to a 1.6- to 5.1-fold improvement in prime editing point mutation efficiency over PE1 (FIG. 39C), and in some cases dramatically improved editing yields up to 46-fold (FIG. 47F and FIG. 47I). PE2 also effected targeted insertions and deletions more efficiently than PE1, achieving the targeted insertion of the 24-bp FLAG epitope tag at the HEK3 locus with 4.5% efficiency, a 15-fold improvement over the efficiency of installing this insertion with PE1 (FIG. 47D), and mediated a 1-bp deletion in HEK3 with 8.6% efficiency, 2.1-fold higher than that of PE1 (FIG. 39C). These results establish PE2 as a more efficient prime editor than PE1.

Optimization of pegRNA Features

[1279] The relationship between pegRNA architecture and prime editing efficiency was systematically probed at five genomic loci in HEK293T cells with PE2 (FIG. 39C). In general, priming sites with lower GC content required longer PBS sequences (EMX1 and RNF2, containing 40% and 30% GC content, respectively, in the first 10 nt upstream of the nick), whereas those with greater GC content supported prime editing with shorter PBS sequences (HEK4 and FANCF, containing 80% and 60% GC content, respectively, in the first 10 nt upstream of the nick) (FIG. 39C), consistent with the energetic requirements for hybridization of the nicked DNA strand to the pegRNA PBS. No PBS length or GC content level was strictly predictive of prime editing efficiency, and other factors such as secondary structure in the DNA primer or pegRNA extension may also influence editing activity. It is recommended to start with a PBS length of ˜13 nt for a typical target sequence, and exploring different PBS lengths if the sequence deviates from −40-60% GC content. When necessary, optimal PBS sequences should be determined empirically.

[1280] Next, the performance determinants of the RT template portion of the pegRNA were studied. pegRNAs with RT templates ranging from 10-20 nt in length were systemically evaluated at five genomic target sites using PE2 (FIG. 39D) and with longer RT templates as long as 31 nt at three genomic sites (FIGS. 48A-48C). As with PBS length, RT template length also could be varied to maximize prime editing efficiency, although in general many RT template lengths ≥10 nt long support more efficient prime editing (FIG. 39D). Since some target sites preferred longer RT templates (>15 nt) to achieve higher editing efficiencies (FANCF, EMX1), while other loci preferred short RT templates (HEK3, HEK4) (FIG. 39D), it is recommend both short and long RT templates be tested when optimizing a pegRNA, starting with ˜10-16 nt.

[1281] Importantly, RT templates that place a C as the nucleotide adjacent to the terminal hairpin of the sgRNA scaffold generally resulted in lower editing efficiency compared to other pegRNAs with RT templates of similar length (FIGS. 48A-48C). Based on the structure of sgRNAs bound to Cas9^{148,149}, it was considered that the presence of a C as the first nucleotide of the 3′ extension of a canonical sgRNA can disrupt the sgRNA scaffold fold by pairing with G81, a nucleotide that natively forms a pi stack with Tyr 1356 in Cas9 and a non-canonical base pair with sgRNA A68. Since many RT template lengths support prime editing, it is recommended to choose pegRNAs in which the first base of the 3′ extension (the last reverse-transcribed base of the RT template) is not C.

### Design of Prime Editor 3 Systems (PE3 and PE3b)

[1282] While PE2 can transfer genetic information from the pegRNA to the target locus more efficiently than PE1, the manner in which the cell resolves the resulting heteroduplex DNA created by one edited strand and one unedited strand determines if the edit is durable. A previous development of base editing faced a similar challenge since the initial product of cytosine or adenine deamination is heteroduplex DNA containing one edited and one non-edited strand. To increase the efficiency of base editing, a Cas9 D10A nickase was used to introduce a nick into the non-edited strand and to direct DNA repair to that strand, using the edited strand as a template^{129,130,142}. To exploit this principle to enhance prime editing efficiencies, a similar strategy of nicking the non-edited strand using the Cas9 H840A nickase already present in PE2 and a simple sgRNA to induce preferential replacement of the non-edited strand by the cell (FIG. 40A) was tested. Since the edited DNA strand was also nicked to initiate prime editing, a variety of sgRNA-programmed nick locations were tested on the non-edited strand to minimize the production of double-stranded DNA breaks that lead to indels.

[1283] This PE3 strategy was first tested at five genomic sites in HEK293T cells by screening sgRNAs that induce nicks located 14 to 116 bases from the site of the pegRNA-induced nick, either 5′ or 3′ of the PAM. In four of the five sites tested, nicking the non-edited strand increased the amount of indel-free prime editing products compared to the PE2 system by 1.5- to 4.2-fold, to as high as 55% (FIG. 40B). While the optimal nicking position varied depending on the genomic site, nicks positioned 3′ of the PAM (positive distances in FIG. 40B) approximately 40-90 bp from the pegRNA-induced nick generally produced favorable increases in prime editing efficiency (averaging 41%) without excess indel formation (6.8% average indels for the sgRNA resulting in the highest editing efficiency for each of the five sites tested) (FIG. 40B). As expected, at some sites, placement of the non-edited strand nick within 40 bp of the pegRNA-induced nick led to large increases in indel formation up to 22% (FIG. 40B), presumably due to the formation of a double-strand break from nicking both strands close together. At other sites, however, nicking as close as 14 bp away from the pegRNA-induced nick produced only 5% indels (FIG. 40B), suggesting that locus-dependent factors control conversion of proximal dual nicks into double-strand DNA breaks. At one tested site (HEK4), complementary strand nicks either provided no benefit or led to indel levels that surpassed editing efficiency (up to 26%), even when placed at distances >70 bp from the pegRNA-induced nick, consistent with an unusual propensity of the edited strand at that site to be nicked by the cell, or to be ligated inefficiently. It is recommend to start with non-edited strand nicks approximately 50 bp from the pegRNA-mediated nick, and to test alternative nick locations if indel frequencies exceed acceptable levels.

[1284] This model for how complementary strand nicking improved prime editing efficiency (FIG. 40A) predicted that nicking the non-edited strand only after edited strand flap resolution could minimize the presence of concurrent nicks, decreasing the frequency of double-strand breaks that go on to form indels. To achieve temporal control over non-edited strand nicking, sgRNAs with spacer sequences that match the edited strand, but not the original allele, were designed. Using this strategy, referred to hereafter as PE3b, mismatches between the spacer and the unedited allele should disfavor nicking by the sgRNA until after the editing event on the PAM strand takes place. This PE3b approach was tested with five different edits at three genomic sites in HEK293T cells and compared outcomes to those achieved with PE2 and PE3 systems. In all cases, PE3b was associated with substantially lower levels of indels compared to PE3 (3.5- to 30-fold, averaging 12-fold lower indels, or 0.85%), without any evident decrease in overall editing efficiency compared to PE3 (FIG. 40C). Therefore, when the edit lay within a second protospacer, the PE3b system could decrease indels while still improving editing efficiency compared to PE2, often to levels similar to those of PE3 (FIG. 40C).

[1285] Together, these findings established that PE3 systems (Cas9 nickase-optimized reverse transcriptase+pegRNA+sgRNA) improved editing efficiencies ˜3-fold compared with PE2 (FIGS. 40B-40C). PE3 was accompanied by wider ranges of indels than PE2, as expected given the additional nicking activity of PE3. The use of PE3 is recommended when prioritizing prime editing efficiency. When minimization of indels is critical, PE2 offers ˜10-fold lower indel frequencies. When it is possible to use a sgRNA that recognizes the installed edit to nick the non-edited strand, the PE3b system can achieve PE3-like editing levels while greatly reducing indel formation.

[1286] To demonstrate the targeting scope and versatility of prime editing with PE3, the installation of all possible single nucleotide substitutions across the +1 to +8 positions (counting the first base 3′ of the pegRNA-induced nick as position +1) of the HEK3 target site using PE3 and pegRNAs with 10-nucleotide RT templates (FIG. 41A) was explored. Collectively, these 24 distinct edits cover all four transition mutations and all eight transversion mutations, and proceed with editing efficiencies (containing no indels) averaging 33±7.9% (ranging between 14% and 48%), with an average of 7.5±1.8% indels.

[1287] Importantly, long-distance RT templates could also give rise to efficient prime editing with PE3. For example, using PE3 with a 34-nt RT template, point mutations were installed at positions +12, +14, +17, +20, +23, +24, +26, +30, and +33 (12 to 33 bases from the pegRNA-induced nick) in the HEK3 locus with an average of 36±8.7% efficiency and 8.6±2.0% indels (FIG. 41B). Although edits beyond the +10 position at other loci were not attempted, other RT templates ≥30 nt at three alternative sites also support efficient editing (FIGS. 48A-C). The viability of long RT templates enabled efficient prime editing for dozens of nucleotides from the initial nick site. Since an NGG PAM on either DNA strand occurs on average every ˜8 bp, far less than maximum distances between the edit and the PAM that support efficient prime editing, prime editing is not substantially constrained by the availability of a nearby PAM sequence, in contrast with other precision genome editing methods^{125,142,154}. Given the presumed relationship between RNA secondary structure and prime editing efficiency, when designing pegRNAs for long-range edits it is prudent to test RT templates of various lengths and, if necessary, sequence compositions (e.g., synonymous codons) to optimize editing efficiency.

[1288] To further test the scope and limitations of the PE3 system for introducing transition and transversion point mutations, 72 additional edits covering all 12 possible types of point mutations across six additional genomic target sites (FIG. 41C-41H) were tested. Overall, indel-free editing efficiency averaged 25±14%, while indel formation averaged 8.3±7.5%. Since the pegRNA RT template included the PAM sequence, prime editing could induce changes to the PAM sequence. In these cases, higher editing efficiency (averaging 39±9.7%) and lower indel generation (averaging 5.0±2.9%) were observed (FIGS. 41A-41K, point mutations at positions +5 or +6). This increase in efficiency and decrease in indel formation for PAM edits may arise from the inability of the Cas9 nickase to re-bind and nick the edited strand prior to the repair of the complementary strand. Since prime editing supports combination edits with no apparent loss of editing efficiency, editing the PAM, in addition to other desired changes, when possible, is recommended.

[1289] Next, 14 targeted small insertions and 14 targeted small deletions at seven genomic sites using PE3 (FIG. 41I) were performed. Targeted 1-bp insertions proceeded with an average efficiency of 32±9.8%, while 3-bp insertions were installed with an average efficiency of 39±16%. Targeted 1-bp and 3-bp deletions were also efficient, proceeding with an average yield of 29±14% and 32±11%, respectively. Indel generation (beyond the targeted insertion or deletion) averaged 6.8±5.4%. Since insertions and deletions introduced between positions +1 and +6 alter the position or the structure of the PAM, it was considered that insertion and deletion edits in this range are typically more efficient due to the inability of Cas9 nickase to re-bind and nick the edited DNA strand prior to repair of the complementary strand, similar to point mutations that edit the PAM.

[1290] PE3 was also tested for its ability to mediate larger precise deletions of 5 bp to 80 bp at the HEK3 site (FIG. 41J). Very high editing efficiencies (52 to 78%) were observed for 5-, 10-, and 15-bp deletions when using a 13-nt PBS and an RT template that contained 29, 24, or 19 bp of homology to the target locus, respectively. Using a 26-nt RT template supported a larger deletion of 25 bp with 72±4.2% efficiency, while a 20-nt RT template enabled an 80-bp deletion with an efficiency of 52±3.8%. These targeted deletions were accompanied by indel frequencies averaging 11±4.8% (FIG. 41J).

[1291] Finally, the ability of PE3 to mediate 12 combinations of multiple edits at the same target locus consisting of insertions and deletions, insertions and point mutations, deletions and point mutations, or two point mutations across three genomic sites was tested. These combination edits were very efficient, averaging 55% of the target edit with 6.4% indels (FIG. 41K), and demonstrating the ability of prime editing to make combinations of precision insertions, deletions, and point mutations at individual target sites with high efficiency and low indel frequencies.

[1292] Together, the examples in FIGS. 41A-41K represent 156 distinct transition, transversion, insertion, deletion, and combination edits across seven human genomic loci. These findings establish the versatility, precision, and targeting flexibility of prime editing.

Prime Editing Compared with Base Editing

[1293] Current-generation cytidine base editors (CBEs) and adenine base editors (ABEs) can install C•G-to-T•A transition mutations and A•T-to-G•C transition mutations with high efficiency and low indels^{129,130,142}. The application of base editing can be limited by the presence of multiple cytidine or adenine bases within the base editing activity window (typically ˜5-bp wide), which gives rise to unwanted bystander edits^{129,130,142,155}, or by the absence of a PAM positioned approximately 15±2 nt from the target nucleotide^{142,156} Prime editing can be particularly useful for precise installation of transitions mutations without bystander edits, or when the lack of suitably positioned PAMs precludes favorable positioning the target nucleotide within the CBE or ABE activity window.

[1294] Prime editing and cytosine base editing was compared by editing three genomic loci that contain multiple target cytidines in the canonical base editing window (protospacer positions 4-8, counting the PAM as positions 21-23) using optimized CBEs¹⁵⁷ without nickase activity (BE2max) or with nickase activity (BE4max), or using the analogous PE2 and PE3 prime editing systems. Among the nine total target cytosines within the base editing windows of the three sites, BE4max yielded 2.2-fold higher average total C•G-to-T•A conversion than PE3 for bases in the center of the base editing window (protospacer positions 5-7, FIG. 42A). Likewise, non-nicking BE2max outperformed PE2 by 1.4-fold on average at these well-positioned bases (FIG. 42A). However, PE3 outperformed BE4max by 2.7-fold, and PE2 outperformed BE2max by 2.0-fold, for cytosines beyond the center of the base editing window (average editing of 40±17% for PE3 vs. 15±18% for BE4max, and 22±11% for PE2 vs. 11±13% for BE2max). Overall, indel frequencies for PE2 were very low (averaging 0.86±0.47%), and for PE3 were similar to or modestly higher than that of BE4max (BE4max range: 2.5% to 14%; PE3 range: 2.5% to 21%) (FIG. 42B).

[1295] When comparing the efficiency of base editing to prime editing for installation of precise C•G-to-T•A edits (without any bystander editing), the efficiency of prime editing greatly exceeded that of base editing at the above sites, which like most genomic DNA sites, contain multiple cytosines within the ˜5-bp base editing window (FIG. 42C). At these sites, such as EMX1, which contains cytosines at protospacer positions C5, C6, and C7, BE4max generated few products containing only the single target base pair conversion with no bystander edits. In contrast, prime editing at this site could be used to selectively install a C•G-to-T•A edit at any position or combination of positions (C5, C6, C7, C5+C6, C6+C7, C5+C7, or C5+C6+C7) (FIG. 42C). All precise one-base or two-base edits (that is, edits that do not modify any other nearby bases) were much more efficient with PE3 or PE2 than with BE4max or BE2, respectively, while the three-base C•G-to-T•A edit was more efficient with BE4max (FIG. 42C), reflecting the propensity of base editors to edit all target bases within the activity window. Taken together, these results demonstrate that cytosine base editors can result in higher levels of editing at optimally positioned target bases than PE2 or PE3, but prime editing can outperform base editing at non-optimally positioned target bases, and can edit with much higher precision with multiple editable bases.

[1296] A•T-to-G•C editing was compared at two genomic loci by an optimized non-nicking ABE (ABEmax¹⁵² with a dCas9 instead of a Cas9 nickase, hereafter referred to as ABEdmax) versus PE2, and by the optimized nicking adenine base editor ABEmax versus PE3. At a site that contains two target adenines in the base editing window (HEK3), ABEs were more efficient than PE2 or PE3 for conversion of A5, but PE3 was more efficient for conversion of A8, which lies at the edge of the ABEmax editing window (FIG. 42D). When comparing the efficiency of precision edits in which only a single adenine is converted, PE3 outperformed ABEmax at both A5 and A8 (FIG. 42E). Overall, ABEs produced far fewer indels at HEK3 than prime editors (0.19±0.02% for ABEdmax vs. 1.5±0.46% for PE2, and 0.53±0.16% for ABEmax vs. 11±2.3% for PE3, FIG. 42F). At FANCF, in which only a single A is present within the base editing window, ABE2 and ABEmax outperformed their prime editing counterparts in total target base pair conversion by 1.8- to 2.9-fold, with virtually all edited products from both base editing and prime editing containing only the precise edit (FIGS. 42D-42E). As with the HEK3 site, ABEs produced far fewer indels at the FANCF site (FIG. 42F).

[1297] Collectively, these results indicate that base editing and prime editing offer complementary strengths and weaknesses for making targeted transition mutations. For cases in which a single target nucleotide is present within the base editing window, or when bystander edits are acceptable, current base editors are typically more efficient and result in fewer indels than prime editors. When multiple cytosines or adenines are present and bystander edits are undesirable, or when target bases are poorly positioned for base editing relative to available PAMs, prime editors offer substantial advantages.

### Off-Target Prime Editing

[1298] To result in productive editing, prime editing requires target locus:pegRNA spacer complementary for the Cas9 domain to bind, target locus:pegRNA PBS complementarity for pegRNA-primed reverse transcription to initiate, and target locus:reverse transcriptase product complementarity for flap resolution. These three distinct DNA hybridization requirements can minimize off-target prime editing compared to that of other genome editing methods. To demonstrate this, HEK293T cells were treated with PE3 or PE2 and 16 total pegRNAs designed to target four on-target genomic loci, with Cas9 and the four corresponding sgRNAs targeting the same protospacers, or with Cas9 and the same 16 pegRNAs. These four target loci were chosen because each has at least four well-characterized off-target sites for which Cas9 and the corresponding on-target sgRNA in HEK293T cells is known to cause substantial off-target DNA modification^{118,159}. Following treatment, the four on-target loci and the top four known Cas9 off-target sites for each on-target spacer, were sequenced, for a total of 16 off-target sites (Table 1).

[1299] Consistent with previous studies¹¹⁸, Cas9 and the four target sgRNAs modified all 16 of the previously reported off-target loci (FIG. 42G). Cas9 off-target modification efficiency among the four off-target sites for the HEK3 target locus averaged 16%. Cas9 and the sgRNA targeting HEK4 resulted in an average of 60% modification of the four tested known off-target sites. Likewise, off-target sites for EMX1 and FANCF were modified by Cas9:sgRNA at an average frequency of 48% and 4.3%, respectively (FIG. 42G). It was noted that pegRNAs with Cas9 nuclease modified on-target sites at similar (1- to 1.5-fold lower) efficiency on average compared to sgRNAs, while pegRNAs with Cas9 nuclease modified off-target sites at ˜4-fold lower average efficiency than sgRNAs.

[1300] Strikingly, PE3 or PE2 with the same 16 tested pegRNAs containing these four target spacers resulted in much lower off-target editing (FIG. 42H). Of the 16 sites known to undergo off-target editing by Cas9+sgRNA, PE3+pegRNAs or PE2+pegRNAs resulted in detectable off-target prime editing at only 3 of 16 off-target sites, with only 1 of 16 showing off-target editing efficiency ≥1% (FIG. 42H). Average off-target prime editing for the pegRNAs targeting HEK3, HEK4, EMX1, and FANCF at these 16 known Cas9 off-target sites was <0.1%, <2.2±5.2%, <0.1%, and <0.13±0.11%, respectively (FIG. 42H). Notably, at the HEK4 off-target 3 site that Cas9+pegRNA1 edits with 97% efficiency, PE2+pegRNA1 results in only 0.7% off-target editing despite sharing the same spacer sequence, demonstrating how the two additional DNA hybridization events required for prime editing compared to Cas9 editing can greatly reduce off-target editing. Taken together, these results suggest that PE3 and pegRNAs induce much lower off-target DNA editing in human cells than Cas9 and sgRNAs that target the same protospacers.

[1301] Reverse transcription of 3′-extended pegRNAs in principle can proceed into the guide RNA scaffold. If the resulting 3′ flap, despite a lack of complementary at its 3′ end with the unedited DNA strand, is incorporated into the target locus, the outcome is insertion of pegRNA scaffold nucleotides that contributes to indel frequency. We analyzed sequencing data from 66 PE3-mediated editing experiments at four loci in HEK293T cells and observed pegRNA scaffold insertion at a low frequency, averaging 1.7±1.5% total insertion of any number of pegRNA scaffold nucleotides (FIGS. 56A-56D). Inaccessibility of the guide RNA scaffold to the reverse transcriptase due to Cas9 domain binding, as well as cellular excision during flap resolution of the mismatched 3′ end of the 3′ flap that results from pegRNA scaffold reverse transcription, can minimize products that incorporate pegRNA scaffold nucleotides. While such events are rare, future efforts to engineer pegRNAs or prime editor proteins that minimize pegRNA scaffold incorporation may further decrease indel frequencies.

[1302] Deaminases in some base editors can act in a Cas9-independent manner, resulting in low-level but widespread off-target DNA editing among first-generation CBEs (but not ABEs)¹⁶⁰⁻¹⁶² and off-target RNA editing among first-generation CBEs and ABEs¹⁶³⁻¹⁶⁵, although newer CBE and ABE variants with engineered deaminases greatly reduce Cas9-independent off-target DNA and RNA editing¹⁶³⁻¹⁶⁵. Prime editors lack base-modification enzymes such as deaminases, and therefore have no inherent ability to modify DNA or RNA bases in a Cas9-independent manner.

[1303] While the reverse transcriptase domain in prime editors in principle could process properly primed RNA or DNA templates in cells, it was noted that retrotransposons such as those in the LINE-1 family¹⁶⁶, endogenous retroviruses^{167,168}, and human telomerase all provided active endogenous human reverse transcriptases. Their natural presence in human cells suggests that reverse transcriptase activity itself is not substantially toxic. Indeed, no PE3-dependent differences were observed in HEK293T cell viability compared to that of controls expressing dCas9, Cas9 H840A nickase, or PE2 with R110S+K103L (PE2-dRT) mutations that inactivate the reverse transcriptase¹⁶⁹ (FIGS. 49A-49B).

[1304] The above data and analyses notwithstanding, additional studies are needed to assess off-target prime editing in an unbiased, genome-wide manner, as well as to characterize the extent to which the reverse transcriptase variants in prime editors, or prime editing intermediates, may affect cells.

### Prime Editing Pathogenic Transversion, Insertion, and Deletion Mutations in Human Cells

[1305] The ability of PE3 to directly install or correct in human cells transversion, small insertion, and small deletion mutations that cause genetic diseases, was tested. Sickle cell disease is most commonly caused by an A•T-to-T•A transversion mutation in HBB, resulting in the mutation of Glu6→Val in beta-globin. Treatment of hematopoietic stem cells ex vivo with Cas9 nuclease and a donor DNA template for HDR, followed by enrichment of edited cells, transplantation, and engraftment is a promising potential strategy for the treatment of sickle-cell disease¹⁷⁰. However, this approach still generates many indel-containing byproducts in addition to the correctly edited HBB allele¹⁷⁰⁻¹⁷¹. While base editors generally produce far fewer indels, they cannot currently make the T•A-to-A•T transversion mutation needed to directly restore the normal sequence of HBB.

[1306] PE3 was used to install the HBB E6V mutation in HEK293T cells with 44% efficiency and 4.8% indels (FIG. 43A. From the mixture of PE3-treated cells, we isolated six HEK293T cell lines that are homozygous (triploid) for the HBB E6V allele (FIGS. 53A-53D), demonstrating the ability of prime editing to generate human cell lines with pathogenic mutations. To correct the HBB E6V allele to wild-type HBB, we treated homozygous HBB E6V HEK293T cells with PE3 and a pegRNA programmed to directly revert the HBB E6V mutation to wild-type HBB. In total, 14 pegRNA designs were tested. After three days, DNA sequencing revealed that all 14 pegRNAs when combined with PE3 gave efficient correction of HBB E6V to wild-type HBB (≥26% wild-type HBB without indels), and indel levels averaging 2.8±0.70% (FIG. 50A). The best pegRNA resulted in 52% correction of HBB E6V to wild-type with 2.4% indels (FIG. 43A). Introduction of a silent mutation that modifies the PAM recognized by the pegRNA modestly improved editing efficiency and product purity, to 58% correction with 1.4% indels (FIG. 43A). These results establish that prime editing can install and correct a pathogenic transversion point mutation in a human cell line with high efficiency and minimal byproducts.

[1307] Tay-Sachs disease is most often caused by a 4-bp insertion into the HEXA gene (HEXA 1278+TATC)¹³⁶. PE3 was used to install this 4-bp insertion into HEK293T cells with 31% efficiency and 0.8% indels (FIG. 43B), and isolated two HEK293T cell lines that are homozygous for the HEXA 1278+TATC allele (FIGS. 53A-53D). These cells were used to test 43 pegRNAs and three nicking sgRNAs with PE3 or PE3b systems for correction of the pathogenic insertion in HEXA (FIG. 50B), either by perfect reversion to the wild-type allele or by a shifted 4-bp deletion that disrupts the PAM and installs a silent mutation. Nineteen of the 43 pegRNAs tested resulted in ≥20% editing. Perfect correction to wild-type HEXA with PE3 or PE3b and the best pegRNA proceeded with similar average efficiencies (30% for PE3 vs. 33% for PE3b), but the PE3b system was accompanied by 5.3-fold fewer indel products (1.7% for PE3 vs. 0.32% for PE3b) (FIG. 43B and FIG. 50B). These findings demonstrate the ability of prime editing to make precise small insertions and deletions that install or correct a pathogenic allele in mammalian cells efficiently and with a minimum of byproducts.

[1308] Finally, the installation of a protective SNP into PRNP, the gene encoding the human prion protein (PrP), was tested. PrP misfolding causes progressive and fatal neurodegenerative prion disease that can arise spontaneously, through inherited dominant mutations in the PRNP gene, or through exposure to misfolded PrP¹⁷². A PRNP G127V mutant allele confers resistance to prion disease in humans¹³⁸ and mice¹⁷³. PE3 was used to install G127V into the human PRNP allele in HEK293T cells, which requires a G•C-to-T•A transversion. Four pegRNAs and three nicking sgRNAs were evaluated with the PE3 system. After three days of exposure to the most effective PE3 and pegRNA, DNA sequencing revealed 53±11% efficiency of installing the G127V mutation and indel levels of 1.7±0.7% (FIG. 43C). Taken together, these results establish the ability of prime editing in human cells to install or correct transversion, insertion, or deletion mutations that cause or confer resistance to disease efficiently, and with a minimum of byproducts.

### Prime Editing in Various Human Cell Lines and Primary Mouse Neurons

[1309] Next, prime editing was tested for its ability to edit endogenous sites in three additional human cell lines. In K562 (leukemic bone marrow) cells, PE3 was used to perform transversion edits in the HEK3, EMX1, and FANCF sites, as well as the 18-bp insertion of a 6×His tag in HEK3. An average editing efficiency of 15-30% was observed for each of these four PE3-mediated edits, with indels averaging 0.85-2.2% (FIG. 43A). In U2OS (osteosarcoma) cells, transversion mutations in HEK3 and FANCF were installed, as well as a 3-bp insertion and 6×His tag insertion into HEK3, with 7.9-22% editing efficiency that exceeded indel formation 10- to 76 fold (FIG. 43A). Finally, in HeLa (cervical cancer) cells, a 3-bp insertion into HEK3 was performed, with 12% average efficiency and 1.3% indels (FIG. 43A). Collectively, these data indicate that multiple cell lines beyond HEK293T cells support prime editing, although editing efficiencies vary by cell type and are generally less efficient than in HEK293T cells. Editing:indel ratios remained high in all tested human cell lines.

[1310] To determine if prime editing is possible in post-mitotic, terminally differentiated primary cells, primary cortical neurons harvested from E18.5 mice were transduced with a dual split-PE3 lentiviral delivery system in which split-intein splicing²⁰³ reconstitutes PE2 protein from N-terminal and C-terminal halves, each delivered from a separate virus. To restrict editing to post-mitotic neurons, the human synapsin promoter, which is highly specific for mature neurons²⁰⁴, was used to drive expression of both PE2 protein components. GFP was fused through a self-cleaving P2A peptide²⁰⁵ to the N-terminal half of PE2. Nuclei from neurons were isolated two weeks following dual viral transduction and were sequenced directly, or sorted for GFP expression before sequencing. A 7.1±1.2% average prime editing to install a transversion at the DNMT1 locus with 0.58±0.14% average indels in sorted nuclei (FIG. 43D was observed. Cas9 nuclease in the same split-intein dual lentivirus system resulted in 31±5.5% indels among sorted cortical neuron nuclei (FIG. 43D. These data indicate that post-mitotic, terminally differentiated primary cells can support prime editing, and thus establish that prime editing does not require cell replication.

Prime Editing Compared with Cas9-Initiated HDR

[1311] The performance of PE3 was compared with that of optimized Cas9-initiated HDR^{128,125} in mitotic cell lines that support HDR¹²⁸. HEK293T, HeLa, K562 and U2OS cells were treated with Cas9 nuclease, a sgRNA, and an ssDNA donor oligonucleotide template designed to install a variety of transversion and insertion edits (FIGS. 43E-43G, and FIGS. 51A-51F). Cas9-initiated HDR in all cases successfully installed the desired edit, but with far higher levels of byproducts (predominantly indels), as expected from treatments that cause double-stranded breaks. Using PE3 in HEK293T cells, HBB E6V installation and correction proceeded with 42% and 58% average editing efficiency with 2.6% and 1.4% average indels, respectively (FIG. 43E and FIG. 43G). In contrast, the same edits with Cas9 nuclease and an HDR template resulted in 5.2% and 6.7% average editing efficiency, with 79% and 51% average indel frequency (FIG. 43E and FIG. 43G). Similarly, PE3 installed PRNP G127V with 53% efficiency and 1.7% indels, whereas Cas9-initiated HDR installed this mutation with 6.9% efficiency and 53% indels (FIG. 43E and FIG. 43G). Thus, the ratio of editing:indels for HBB E6V installation, HBB E6V correction, and PRNP G127V installation on average was 270-fold higher for PE3 than for Cas9-initiated HDR.

[1312] Comparisons between PE3 and HDR in human cell lines other than HEK293T showed similar results, although with lower PE3 editing efficiencies. For example, in K562 cells, PE3-mediated 3-bp insertion into HEK3 proceeded with 25% efficiency and 2.8% indels, compared with 17% editing and 72% indels for Cas9-initiated HDR, a 40-fold editing:indel ratio advantage favoring PE3 (FIGS. 43F-43G). In U2OS cells, PE3 performed this 3-bp insertion with 22% efficiency and 2.2% indels, while Cas9-initiated HDR resulted in 15% editing with 74% indels, a 49-fold lower editing:indel ratio (FIGS. 43F-43G). In HeLa cells, PE3 made this insertion with 12% efficiency and 1.3% indels, versus 3.0% editing and 69% indels for Cas9-initiated HDR, a 210-fold editing:indel ratio difference (FIGS. 43F-43G). Collectively, these data indicated that HDR typically results in similar or lower editing efficiencies and far higher indels than PE3 in the four cell lines tested (FIGS. 51A-51F).

### Discussion and Future Directions

[1313] The ability to insert DNA sequences with single-nucleotide precision is an especially enabling prime editing capability. For example, PE3 was used to precisely insert into the HEK3 locus in HEK293T cells a His6tag (18 bp, 65% average efficiency), a FLAG epitope tag (24 bp, 18% average efficiency), and an extended LoxP site (44 bp, 23% average efficiency) that is the native substrate for Cre recombinase. Average indels ranged between 3.0% and 5.9% for these examples (FIG. 43H). Many biotechnological, synthetic biology, and therapeutic applications are envisioned to arise from the ability to efficiently and precisely introduce new DNA sequences into target sites of interest in living cells.

[1314] Collectively, the prime editing experiments described herein installed 18 insertions up to 44 bp, 22 deletions up to 80 bp, 113 point mutations including 77 transversions, and 18 combination edits, across 12 endogenous loci in the human and mouse genomes at locations ranging from 3 bp upstream to 29 bp downstream of the start of a PAM without making explicit double-stranded DNA breaks. These results establish prime editing as a remarkably versatile genome editing method. Because the overwhelming majority (85-99%) of insertions, deletions, indels, and duplications in ClinVar are ≤30 bp (FIGS. 52A-52D), in principle prime editing can correct up to ˜89% of the 75,122 currently known pathogenic human genetic variants in ClinVar (transitions, transversions, insertions, deletions, indels, and duplications in FIG. 38A), with additional potential to ameliorate diseases caused by copy number gain or loss.

[1315] Importantly, for any desired edit the flexibility of prime editing offers many possible choices of pegRNA-induced nick locations, sgRNA-induced second nick locations, PBS lengths, RT template lengths, and which strand to edit first, as demonstrated extensively herein. This flexibility, which contrasts with more limited options typically available for other precision genome editing methods^{125,142,154}, allows editing efficiency, product purity, DNA specificity, or other parameters to be optimized to suit the needs of a given application, as shown in FIGS. 50A-50B in which testing 14 and 43 pegRNAs covering a range of prime editing strategies optimized correction of pathogenic HBB and HEXA alleles, respectively.

[1316] By enabling highly precise targeted transitions, transversions, small insertions, and small deletions in the genomes of mammalian cells without requiring double-stranded breaks or HDR, however, prime editing provides a new “search-and-replace” capability that substantially expands the scope of genome editing.

### Example 2: pegRNA Modifications

[1317] Described herein is a series of pegRNA designs and strategies that can improve prime editing (PE) efficiency.

[1318] Prime editing (PE) is a genome editing technology that can replace, insert, or remove defined DNA sequences within a targeted genetic locus using information encoded within a prime editing guide RNA (pegRNA). Prime editors (PEs) consist of a sequence-programmable DNA binding protein with nuclease activity (Cas9) fused to a polymerase, such as a reverse transcriptase (RT) enzyme. PEs form complexes with pegRNAs, which contain the information for targeting specific DNA loci within their spacer sequences, as well as information specifying the desired edit in an engineered extension built into a standard sgRNA scaffold. PE:pegRNA complexes bind and nick the programmed target DNA locus, allowing hybridization of the nicked DNA strand to the engineered primer binding sequence (PBS) of the pegRNA. The reverse transcriptase domain then copies the edit-encoding information within the RT template portion of the pegRNA, using the nicked genomic DNA as a primer for DNA polymerization. Subsequent DNA repair processes incorporate the newly synthesized edited DNA strand into the genomic locus. Improvements to the design of these pegRNAs can result in improved PE efficiency, as well as enable installation of longer inserted sequences into the genome.

[1319] Described herein is a series of pegRNA designs that are envisioned to improve the efficacy of PE. These designs take advantage of a number of previously published approaches for improving sgRNA efficacy and/or stability, as well as utilize a number of novel strategies. These improvements can belong to one or more of a number of different categories:
[1320] (1) Longer pegRNAs. This category relates to improved designs that enable efficient expression of functional pegRNAs from non-polymerase III (pol III) promoters, which would enable the expression of longer pegRNAs without burdensome sequence requirements;
[1321] (2) Core improvements. This category relates to improvements to the core, Cas9-binding pegRNA scaffold, which could improve efficacy;
[1322] (3) RT processivity. This category relates to modifications to the pegRNA that improve RT processivity, enabling the insertion of longer sequences at targeted genomic loci; and
[1323] (4) Termini motifs. This category relates to the addition of RNA motifs to the 5′ and/or 3′ termini of the pegRNA that improve pegRNA stability, enhance RT processivity, prevent mis-folding of the pegRNA, or recruit additional factors important for genome editing.

[1324] Described herein are a number of potential such pegRNA designs in each category. Several of these designs have been previously described for improving sgRNA activity with Cas9 and are indicated as such. Described herein is also a platform for the evolution of pegRNAs for given sequence targets that would enable the polishing of the pegRNA scaffold and enhance PE activity (5). Notably, these designs could also be readily applied to improve pegRNAs recognized by any Cas9 or evolved variant thereof.

### (1) Longer Peg RNAs.

[1325] sgRNAs are typically expressed from the U6 snRNA promoter. This promoter recruits pol III to express the associated RNA and is useful for expression of short RNAs that are retained within the nucleus. However, pol III is not highly processive and is unable to express RNAs longer than a few hundred nucleotides in length at the levels required for efficient genome editing¹⁸³. Additionally, pol III can stall or terminate at stretches of U's, potentially limiting the sequence diversity that could be inserted using a pegRNA. Other promoters that recruit polymerase II (such as pCMV) or polymerase I (such as the U1 snRNA promoter) have been examined for their ability to express longer sgRNAs¹⁸³. However, these promoters are typically partially transcribed, which would result in extra sequence 5′ of the spacer in the expressed pegRNA, which has been shown to result in markedly reduced Cas9:sgRNA activity in a site-dependent manner. Additionally, while pol III-transcribed pegRNAs can simply terminate in a run of 6-7 U's, pegRNAs transcribed from pol II or pol I would require a different termination signal. Often such signals also result in polyadenylation, which would result in undesired transport of the pegRNA from the nucleus. Similarly, RNAs expressed from pol II promoters such as pCMV are typically 5′-capped, also resulting in their nuclear export.

[1326] Previously, Rinn and coworkers screened a variety of expression platforms for the production of long-noncoding RNA-(lncRNA) tagged sgRNAs¹⁸³. These platforms include RNAs expressed from pCMV and that terminate in the ENE element from the MALAT1 ncRNA from humans¹⁸⁴, the PAN ENE element from KSHViss, or the 3′ box from U1 snRNA¹⁸⁶. Notably, the MALAT1 ncRNA and PAN ENEs form triple helices protecting the polyA-tail^{184, 187}. In addition to enabling expression of RNAs, these constructs could also enhance RNA stability (see section iv). Using the promoter from the U1 snRNA to enable expression of these longer sgRNAs¹⁸³ was also explored. These expression systems will also enable the expression of longer pegRNAs. In addition, a series of methods have been designed for the cleavage of the portion of the pol II promoter that would be transcribed as part of the pegRNA, adding either a self-cleaving ribozyme such as the hammerhead¹⁸⁸, pistol¹⁸⁹, hatchet¹⁸⁹, hairpin¹⁹⁰, VS¹⁹¹, twister¹⁹², or twister sister¹⁹² ribozymes, or other self-cleaving elements to process the transcribed guide, or a hairpin that is recognized by Csy4¹⁹³ and also leads to processing of the guide. Also, incorporation of multiple ENE motifs can lead to improved pegRNA expression and stability. Circularizing the pegRNA in the form of a circular intronic RNA (ciRNA) can lead to enhanced RNA expression and stability, as well as nuclear localization¹⁹⁴. Exemplary pegRNA expression platforms are represented by SEQ ID NOs: 241-245.

### (2) Core/Scaffold Improvements.

[1327] The core, Cas9-binding pegRNA scaffold can likely be improved to enhance PE activity. In an exemplary approach, the first pairing element of the scaffold (P1) contains a GTTTT-AAAAC (SEQ ID NO: 246) pairing element. Such runs of Ts can result in pol III pausing and premature termination of the RNA transcript. Rational mutation of one of the T-A pairs to a G-C pair in this portion of P1 can enhance sgRNA activity. This approach can be used to improve pegRNAs. Additionally, increasing the length of P1 can enhance sgRNA folding and lead to improved activity. Finally, it is likely the polishing of the pegRNA scaffold through directed evolution of pegRNAs on a given DNA target would also result in improved activity. This is described in section (v). Exemplary modified pegRNAs are represented by SEQ ID NOs: 247 and 248.

[1328] A number of structural modifications to the gRNA scaffold were also tested, none of which showed a significant increase in editing activity (see FIG. 82 at 3.30.13 through 3.30.19 in the X axis, as compare to 3.30). However, this data has two caveats worth noting. First, this guide already worked quite well, and a less effective guide would have been better to test. Second, in HEK cells, transfection is quite efficient, and it was noted that the amount of guide RNA transfected is in large excess compared to what is needed (reducing the amount by ˜4-8 fold has no effect on editing). These improvements might only be seen in other cell types, where transfection efficiency is lower, or with less effective guides. Many of these changes are precedented to improve sgRNA activity in other cell lines.

[1329] The sequences of the constructs of FIG. 82 are as follows:

HEK3.30 pegRNA sequence: spacer-GGCCCAGACUGAGCACGUGA-scaffold-
GUUUUAGAGCUAGAAAUAGCAAGUUAAAAUAAGGCUAGUCCGUUAUCAACU
UGAAAAAGUGGCACCGAGUCGGUGC-Templateand PBS-
UCUGCCAUCAAAGCGUGCUCAGUCUG-Terminal motif-UUUU
(SEQ ID NO: 429)
HEK3.30.0 pegRNA sequence: spacer-GGCCCAGACUGAGCACGUGA-scaffold-
GUUUUAGAGCUAGAAAUAGCAAGUUAAAAUAAGGCUAGUCCGUUAUCAACU
UGAAAAAGUGGCACCGAGUCGGUGC-Template and PBS-
UCUGCCAUCAAAGCGUGCUCAGUCUG-Terminal motif-UUUUUU
(SEQ ID NO: 430)
HEK3.30.1 pegRNA sequence: spacer-GGCCCAGACUGAGCACGUGA-scaffold-
GUUUUAGAGCUAGAAAUAGCAAGUUAAAAUAAGGCUAGUCCGUUAUCAACU
UGAAAAAGUGGCACCGAGUCGGUGC-Template and PBS-
UCUGCCAUCAAAGCGUGCUCAGUCUG-Terminal motif-[none]
(SEQ ID NO: 431)
HEK3.30.2 pegRNA sequence: spacer-GGCCCAGACUGAGCACGUGA-scaffold-
GUUUUAGAGCUAGAAAUAGCAAGUUAAAAUAAGGCUAGUCCGUUAUCAACU
UGAAAAAGUGGCACCGAGUCGGUGC-Template and PBS-
UCUGCCAUCAAAGCGUGCUCAGUCUG-Terminal motif-
UUUGCUCGAGGCGGAAACGCCUCGAGCUUUU
(SEQ ID NO: 432)
HEK3.30.2b pegRNA sequence: spacer-GGCCCAGACUGAGCACGUGA-scaffold-
GUUUUAGAGCUAGAAAUAGCAAGUUAAAAUAAGGCUAGUCCGUUAUCAACU
UGAAAAAGUGGCACCGAGUCGGUGC-Template and PBS-
UCUGCCAUCAAAGCGUGCUCAGUCUG-Terminal motif-
UUUGCUCGAGGCGGAAACGCCUCGAGC
(SEQ ID NO: 433)
HEK3.30.3 pegRNA sequence: spacer-GGCCCAGACUGAGCACGUGA-scaffold-
GUUUUAGAGCUAGAAAUAGCAAGUUAAAAUAAGGCUAGUCCGUUAUCAACU
UGAAAAAGUGGCACCGAGUCGGUGC-Template and PBS-
UCUGCCAUCAAAGCGUGCUCAGUCUG-Terminal motif-
UUUGCUCGAGGCGUACGCGAAAGCGUACGCCUCGAGCUUUU
(SEQ ID NO: 434)
HEK3.30.3b pegRNA sequence: spacer-GGCCCAGACUGAGCACGUGA-scaffold-
GUUUUAGAGCUAGAAAUAGCAAGUUAAAAUAAGGCUAGUCCGUUAUCAACU
UGAAAAAGUGGCACCGAGUCGGUGC-Template and PBS-
UCUGCCAUCAAAGCGUGCUCAGUCUG-Terminal motif-
UUUGCUCGAGGCGUACGCGAAAGCGUACGCCUCGAGC
(SEQ ID NO: 435)
HEK3.30.5 pegRNA sequence: spacer-GGCCCAGACUGAGCACGUGA-scaffold-
GUUUUAGAGCUAGAAAUAGCAAGUUAAAAUAAGGCUAGUCCGUUAUCAACU
UGAAAAAGUGGCACCGAGUCGGUGC-Template and PBS-
UCUGCCAUCAAAGCGUGCUCAGUCUG-Terminal motif-
UUUGCUCGAGGCGUACGCCCGAUGAAAAUCGGGCGUACGCCUCGAGCUUUU
(SEQ ID NO: 436)
HEK3.30.5a pegRNA sequence: spacer-GGCCCAGACUGAGCACGUGA-scaffold-
GUUUUAGAGCUAGAAAUAGCAAGUUAAAAUAAGGCUAGUCCGUUAUCAACU
UGAAAAAGUGGCACCGAGUCGGUGC-Template and PBS-
UCUGCCAUCAAAGCGUGCUCAGUCUG-Terminal motif-
UUUUGGGGUUGGGGUUGGGGUUGGGGUUUU
(SEQ ID NO: 437)
HEK3.30.5b pegRNA sequence: spacer-GGCCCAGACUGAGCACGUGA-scaffold-
GUUUUAGAGCUAGAAAUAGCAAGUUAAAAUAAGGCUAGUCCGUUAUCAACU
UGAAAAAGUGGCACCGAGUCGGUGC-Template and PBS-
UCUGCCAUCAAAGCGUGCUCAGUCUG-Terminal motif-
UUUGGUGGUGGUGGUUUU
(SEQ ID NO: 438)
HEK3.30.13 pegRNA sequence: spacer-GGCCCAGACUGAGCACGUGA-scaffold-
GUUUUAGAGCUAGCGAAAGCUAGCAAGUUAAAAUAAGGCUAGUCCGUUAUC
AACUUGAAAAAGUGGGACCGAGUCGGUCC-Template and PBS-
UCUGCCAUCAAAGCGUGCUCAGUCUG-Terminal motif-UUUU
(SEQ ID NO: 439)
HEK3.30.15 pegRNA sequence: spacer-GGCCCAGACUGAGCACGUGA-scaffold-
GUUUUAGAGCUAGCUCGAAAGAGCUAGCAAGUUAAAAUAAGGCUAGUCCGU
UAUCAACUUGAAAAAGUGGGACCGAGUCGGUCC-Template and PBS-
UCUGCCAUCAAAGCGUGCUCAGUCUG-Terminal motif-UUUU
(SEQ ID NO: 440)
HEK3.30.15 pegRNA sequence: spacer-GGCCCAGACUGAGCACGUGA-scaffold-
GUUUUAGAGCUAGCUCAUGAAAAUGAGCUAGCAAGUUAAAAUAAGGCUAGU
CCGUUAUCAACUUGAAAAAGUGGGACCGAGUCGGUCC-Template and PBS-
UCUGCCAUCAAAGCGUGCUCAGUCUG-Terminal motif-UUUU
(SEQ ID NO: 441)
HEK3.30.16 pegRNA sequence: spacer-GGCCCAGACUGAGCACGUGA-scaffold-
GUUUUAGAGCUAGCUCAUCCGAAAGGAUGAGCUAGCAAGUUAAAAUAAGGC
UAGUCCGUUAUCAACUUGAAAAAGUGGGACCGAGUCGGUCC-Template and
PBS-UCUGCCAUCAAAGCGUGCUCAGUCUG-Terminal motif-UUUU
(SEQ ID NO: 442)
HEK3.30.17 pegRNA sequence: spacer-GGCCCAGACUGAGCACGUGA-scaffold-
GUUUUAGAGCUAGCUCAUCCUGGAAACAGGAUGAGCUAGCAAGUUAAAAUA
AGGCUAGUCCGUUAUCAACUUGAAAAAGUGGGACCGAGUCGGUCC-Template
and PBS-UCUGCCAUCAAAGCGUGCUCAGUCUG-Terminal motif-UUUU
(SEQ ID NO: 443)
HEK3.30.18 pegRNA sequence: spacer-GGCCCAGACUGAGCACGUGA-scaffold-
GUUUGAGAGCUAGAAAUAGCAAGUUUAAAUAAGGCUAGUCCGUUAUCAACU
UGAAAAAGUGGGACCGAGUCGGUCC-Template and PBS-
UCUGCCAUCAAAGCGUGCUCAGUCUG-Terminal motif-UUUU
(SEQ ID NO: 444)
HEK3.30.19 pegRNA sequence: spacer-GGCCCAGACUGAGCACGUGA-scaffold-
GUUUGAGAGCUAGCUCAUGAAAAUGAGCUAGCAAGUUUAAAUAAGGCUAGU
CCGUUAUCAACUUGAAAAAGUGGGACCGAGUCGGUCC-Template and PBS-
UCUGCCAUCAAAGCGUGCUCAGUCUG-Terminal motif-UUUU
(SEQ ID NO: 445)
HEK3.56 pegRNA sequence: spacer-GGCCCAGACUGAGCACGUGA-scaffold-
GUUUUAGAGCUAGAAAUAGCAAGUUAAAAUAAGGCUAGUCCGUUAUCAACU
UGAAAAAGUGGCACCGAGUCGGUGC-Template and PBS-
UCUGCCAUCAAAGCUUCGACCGUGCUCAGUCUG-Terminal motif-UUUU
(SEQ ID NO: 446)
HEK3.56.1a pegRNA sequence: spacer-GGCCCAGACUGAGCACGUGA-scaffold-
GUUUUAGAGCUAGAAAUAGCAAGUUAAAAUAAGGCUAGUCCGUUAUCAACU
UGAAAAAGUGGCACCGAGUCGGUGC-Template and PBS-
UCUGCCAUCAGGCGAAAGCCUCGUGCUCAGUCUG-Terminal motif-UUUU
(SEQ
ID NO: 447)
HEK3.56.1b pegRNA sequence: spacer-GGCCCAGACUGAGCACGUGA-scaffold-
GUUUUAGAGCUAGAAAUAGCAAGUUAAAAUAAGGCUAGUCCGUUAUCAACU
UGAAAAAGUGGCACCGAGUCGGUGC-Template and PBS-
UCUGCCAUCAGACGAAAGCCUCGUGCUCAGUCUG-Terminal motif-UUUU
(SEQ
ID NO: 448)
HEK3.56.1c pegRNA sequence: spacer-GGCCCAGACUGAGCACGUGA-scaffold-
GUUUUAGAGCUAGAAAUAGCAAGUUAAAAUAAGGCUAGUCCGUUAUCAACU
UGAAAAAGUGGCACCGAGUCGGUGC-Template and PBS-
UCUGCCAUCAGGCGAAAGCCCGUGCUCAGUCUG-Terminal motif-UUUU
(SEQ ID NO: 449)
HEK3.56.2a pegRNA sequence: spacer-GGCCCAGACUGAGCACGUGA-scaffold-
GUUUUAGAGCUAGAAAUAGCAAGUUAAAAUAAGGCUAGUCCGUUAUCAACU
UGAAAAAGUGGCACCGAGUCGGUGC-Template and PBS-
UCUGCCAUCAGAUGCGAAAGCAUCUCGUGCUCAGUCUG-Terminal motif-UUUU
(SEQ ID NO: 450)
HEK3.56.2b pegRNA sequence: spacer-GGCCCAGACUGAGCACGUGA-scaffold-
GUUUUAGAGCUAGAAAUAGCAAGUUAAAAUAAGGCUAGUCCGUUAUCAACU
UGAAAAAGUGGCACCGAGUCGGUGC-Template and PBS-
UCUGCCAUCAGAUGCGAAAGCACCUCGUGCUCAGUCUG-Terminal motif-UUUU
(SEQ ID NO: 451)
HEK3.56.2c pegRNA sequence: spacer-GGCCCAGACUGAGCACGUGA-scaffold-
GUUUUAGAGCUAGAAAUAGCAAGUUAAAAUAAGGCUAGUCCGUUAUCAACU
UGAAAAAGUGGCACCGAGUCGGUGC-Template and PBS-
UCUGCCAUCAGAUGCGAAAGCAUCCGUGCUCAGUCUG-Terminal motif-UUUU
(SEQ ID NO: 452)
HEK3.56.3a pegRNA sequence: spacer-GGCCCAGACUGAGCACGUGA-scaffold-
GUUUUAGAGCUAGAAAUAGCAAGUUAAAAUAAGGCUAGUCCGUUAUCAACU
UGAAAAAGUGGCACCGAGUCGGUGC-Template and PBS-
UCUGCCAUCAGACAUGCGAAAGCAUGUCUCGUGCUCAGUCUG-Terminal motif-
UUUU
(SEQ ID NO: 453)
HEK3.56.3b pegRNA sequence: spacer-GGCCCAGACUGAGCACGUGA-scaffold-
GUUUUAGAGCUAGAAAUAGCAAGUUAAAAUAAGGCUAGUCCGUUAUCAACU
UGAAAAAGUGGCACCGAGUCGGUGC-Template and PBS-
UCUGCCAUCAGACAUGCGAAAGCAGGCCCGUGCUCAGUCUG-Terminal motif-
UUUU
(SEQ ID NO: 454)
HEK3.56.3c pegRNA sequence: spacer-GGCCCAGACUGAGCACGUGA-scaffold-
GUUUUAGAGCUAGAAAUAGCAAGUUAAAAUAAGGCUAGUCCGUUAUCAACU
UGAAAAAGUGGCACCGAGUCGGUGC-Template and PBS-
UCUGCCAUCAGACAUGCGAAAGCAUGUCUCGUGCUCAGUCUG-Terminal motif-
UUUU
(SEQ ID NO: 453)
HEK3.56.4a pegRNA sequence: spacer-GGCCCAGACUGAGCACGUGA-scaffold-
GUUUUAGAGCUAUACGUAGCAAGUUAAAAUAAGGCUAGUCCGUUAUCAACU
UUACGAAGUGGGACCGAGUCGGUCC-Template and PBS-
UCUGCCAUCAAAGCUUCGACCGUGCUCAGUCUG-Terminal motif-UUUU
(SEQ ID NO: 455)
HEK3.56.4b pegRNA sequence: 5′motif-
GCAGACCUAAGUGGUGACAUAUGGUCUG-spacer-
GGCCCAGACUGAGCACGUGA-scaffold-
GUUUUAGAGCUAUACGUAGCAAGUUAAAAUAAGGCUAGUCCGUUAUCAACU
UUACGAAGUGGGACCGAGUCGGUCC-Template and PBS--Terminal motif-UUUU
(SEQ ID NO: 456)
HEK3.56.4c pegRNA sequence: 5′motif-
GCAGACCUAAGUGGUGACAUAUGGUCUG-spacer-
GGCCCAGACUGAGCACGUGA-scaffold-
GUUUUAGAGCUAUACGUAGCAAGUUAAAAUAAGGCUAGUCCGUUAUCAACU
UUACGAAGUGGGACCGAGUCGGUCC-Template and PBS--Terminal motif-UUUU
(SEQ ID NO: 456)
HEK3.56.4d pegRNA sequence: 5′motif-
GCAGACCUAAGUGGUGACAUAUGGUCUG-spacer-
GGCCCAGACUGAGCACGUGA-scaffold-
GUUUUAGAGCUAUACGUAGCAAGUUAAAAUAAGGCUAGUCCGUUAUCAACU
UUACGAAGUGGGACCGAGUCGGUCC-Template and PBS--Terminal motif-UUUU
(SEQ ID NO: 456)

Note that where either no terminal motif or a terminal motif that does not end in a run of U's exists, transcript was terminated using the following HDV ribozyme:

(SEQ ID NO: 457)
GGCCGGCAUGGUCCCAGCCUCCUCGCUGGCGCCGG
CUGGGCAACAUGCUUCGGCAUGGCGAAUGGGAC

(3) Improvement of RT Processivity Via Modifications to the Template Region of the pegRNA

[1330] As the size of the insertion templated by the pegRNA increases, it is more likely to be degraded by endonucleases, undergo spontaneous hydrolysis, or fold into secondary structures unable to be reverse-transcribed by the RT or that disrupt folding of the pegRNA scaffold and subsequent Cas9-RT binding. Accordingly, it is likely that modification to the template of the pegRNA might be necessary to affect large insertions, such as the insertion of whole genes. Some strategies to do so include the incorporation of modified nucleotides within a synthetic or semi-synthetic pegRNA that render the RNA more resistant to degradation or hydrolysis or less likely to adopt inhibitory secondary structures¹⁹⁶. Such modifications could include 8-aza-7-deazaguanosine, which would reduce RNA secondary structure in G-rich sequences; locked-nucleic acids (LNA) that reduce degradation and enhance certain kinds of RNA secondary structure; 2′-O-methyl, 2′-fluoro, or 2′-O-methoxyethoxy modifications that enhance RNA stability. Such modifications could also be included elsewhere in the pegRNA to enhance stability and activity. Alternatively or additionally, the template of the pegRNA could be designed such that it both encodes for a desired protein product and is also more likely to adopt simple secondary structures that are able to be unfolded by the RT. Such simple structures would act as a thermodynamic sink, making it less likely that more complicated structures that would prevent reverse transcription would occur. Finally, one could also imagine splitting the template into two, separate pegRNAs. In such a design, a PE would be used to initiate transcription and also recruit a separate template RNA to the targeted site via an RNA-binding protein fused to Cas9 or an RNA recognition element on the pegRNA itself such as the MS2 aptamer. The RT could either directly bind to this separate template RNA, or initiate reverse transcription on the original pegRNA before swapping to the second template. Such an approach could enable long insertions by both preventing mis-folding of the pegRNA upon addition of the long template and also by not requiring dissociation of Cas9 from the genome for long insertions to occur, which could possibly be inhibiting PE-based long insertions.

### (4) Installation of Additional RNA Motifs at the 5′ or 3′ Termini

[1331] pegRNA designs could also be improved via the installation of additional motifs at either end of the terminus of the RNA. Several such motifs—such as the PAN ENE from KSHV and the ENE from MALAT1 were discussed earlier in part (i)^{184,185} as possible means to terminate expression of longer pegRNAs from non-pol III promoters. These elements form RNA triple helices that engulf the polyA tail, resulting in their being retained within the nucleus^{184,187}. However, by forming complex structures at the 3′ terminus of the pegRNA that occlude the terminal nucleotide, these structures would also likely help prevent exonuclease-mediated degradation of pegRNAs. Other structural elements inserted at the 3′ terminus could also enhance RNA stability, albeit without enabling termination from non-pol III promoters. Such motifs could include hairpins or RNA quadruplexes that would occlude the 3′ terminus 197, or self-cleaving ribozymes such as HDV that would result in the formation of a 2′-3′-cyclic phosphate at the 3′ terminus and also potentially render the pegRNA less likely to be degraded by exonucleases¹⁹⁸. Inducing the pegRNA to cyclize via incomplete splicing—to form a ciRNA—could also increase pegRNA stability and result in the pegRNA being retained within the nucleus¹⁹⁴.

[1332] Additional RNA motifs could also improve RT processivity or enhance pegRNA activity by enhancing RT binding to the DNA-RNA duplex. Addition of the native sequence bound by the RT in its cognate retroviral genome could enhance RT activity¹⁹⁹. This could include the native primer binding site (PBS), polypurine tract (PPT), or kissing loops involved in retroviral genome dimerization and initiation of transcription¹⁹⁹. Addition of dimerization motifs—such as kissing loops or a GNRA tetraloop/tetraloop receptor pair²⁰⁰—at the 5′ and 3′ termini of the pegRNA could also result in effective circularization of the pegRNA, improving stability. Additionally, it is envisioned that addition of these motifs could enable the physical separation of the pegRNA spacer and primer, prevention occlusion of the spacer which would hinder PE activity. Short 5′ extensions to the pegRNA that form a small toehold hairpin in the spacer region could also compete favorably against the annealing region of the pegRNA binding the spacer. Finally, kissing loops could also be used to recruit other template RNAs to the genomic site and enable swapping of RT activity from one RNA to the other (section iii). Exemplary pegRNA constructs are represented by SEQ ID NOs: 251-255.

(5) Evolution of pegRNAs

[1333] It is likely that the pegRNA scaffold can be further improved via directed evolution, in an analogous fashion to how SpCas9 and base editors have been improved²⁰¹. Directed evolution could enhance pegRNA recognition by Cas9 or evolved Cas9 variants. Additionally, it is likely that different pegRNA scaffold sequences would be optimal at different genomic loci, either enhancing PE activity at the site in question, reducing off-target activities, or both. Finally, evolution of pegRNA scaffolds to which other RNA motifs have been added would almost certainly improve the activity of the fused pegRNA relative to the unevolved, fusion RNA. For instance, evolution of allosteric ribozymes composed of c-di-GMP-I aptamers and hammerhead ribozymes led to dramatically improved activity²⁰², suggesting that evolution would improve the activity of hammerhead-pegRNA fusions as well. In addition, while Cas9 currently does not generally tolerate 5′ extension of the sgRNA, directed evolution will likely generate enabling mutations that mitigate this intolerance, allowing additional RNA motifs to be utilized.

[1334] As described herein, a number of these approaches have already been described for use with Cas9:sgRNA complexes, but no designs for improving pegRNA activity have been reported. Other strategies for the installation of programmable mutations into the genome include base-editing, homology-directed recombination (HDR), precise microhomology-mediated end-joining (MMEJ), or transposase-mediated editing. However, all of these approaches have significant drawbacks when compared to PEs. Current base editors, while more efficient than existing PEs, can only install certain classes of genomic mutations and can result in additional, undesired nucleotide conversions at the site of interest. HDR is only feasible in a very small minority of cell types and results in comparably high rates of random insertion and deletion mutations (indels). Precise MMEJ can lead to predictable repair of double-strand breaks, but is largely limited to installation of deletions, is very site-dependent, and can also have comparably high rates of undesired indels. Transposase-mediated editing has to date only been shown to function in bacteria. As such improvements to PE represent possibly the best path forward for the therapeutic correction of a wide-swatch of genomic mutations.

### (5) PBS Toeloops

[1335] In order to further improve PE activity, the inventors contemplated adding a toeloop sequence at the 3′ end of a pegRNA having a 3′ extension arm. FIG. 71A provides an example of a generic SpCas9 pegRNA having a 3′ extension arm (top molecule). The 3′ extension arm, in turn, comprises an RT template (that includes that the desired edit) and a primer binding site (PBS) at the 3′ end of the molecule. The molecule terminates with a poly(U) sequence comprising three U nucleobases (i.e., 5′-UUU-3′).

[1336] By contrast, the bottom portion of FIG. 71A shows the same pegRNA molecule as the top portion of FIG. 71A, but wherein a 9-nucleobase sequence of 5′-GAAANNNNN-3′ has been inserted between the 3′ end of the primer binding site and the 5′ end of the terminal poly(U) sequence. This structure folds back on itself by 180° to form a “toeloop” RNA structure, wherein the sequences of 5′-NNNNN-3′ of the 9-nucleobase insertion anneals with a complementary sequence in the primer binding site, and wherein the 5′-GAAA-3′ portion forms the 180° turn. The features of the toeloop sequence depicted in FIG. 71A is not intended to limit or narrow the scope of possible toeloops that could be used in its place. Further, the sequence of the toeloop will depend upon the complementary sequence of the primer binding site. Essentially though, the toeloop sequence, in various embodiments, may have a first sequence portion that forms a 180°, and a second sequence portion that has a sequence that is complentary to a portion of the primer binding site.

[1337] Without being bound by theory, the toeloop sequence is thought to enable pegRNA the use of pegRNAs with increasingly longer primer binding sites than would otherwise be possible. Longer PBS sequences, in turn, are thought to improve PE activity. More in particular, the likely function of the toeloop is to occlude or at least minimize the PBS from interacting with the spacer. Stable hairpin formation between the PBS and the spacer can lead to an inactive pegRNA. Without a toeloop, this interaction may require restricting the length of the PBS. Blocking or minimizing the interaction between the spacer and the PBS using a 3′ end toeloop may lead to an improvement in PE activity.

(6) Expression of pegRNAs from Non-Pol III Promoters

[1338] A variety of pegRNA expression systems were tested for their ability to generate pegRNAs, using insertion of a 102 nucleotide sequence from FKBP as a readout.

[1339] Transcription of pegRNA can be directed by a typical constitutive promoter, such as U6 promoter. Although the U6 promoter is in most cases effective at directing transcription of pegRNAs, the U6 promoter is not very effective at directing the transcription of longer pegRNAs or U-rich RNAs. U-rich RNA stretches of cause premature termination of transcription. This Example compared editing outcomes of guides expressed from the CMV promoter or U1 promoter with the U6 promoter. These promoters require a different terminator sequence, such as MASC ENE or PAN ENE, as provided below. An increase in editing was observed with the pCMV/MASC-ENE system, however these guides resulted in incomplete insertion of the sequence, while, with the U6 promoter, complete insertion was observed at lower levels of editing. See FIG. 81. The data suggests the likelihood that the alternate expression systems may be useful for long insertions.

[1340] The nucleotide sequence of the pCMV/MASC-ENE expression systems as follows (5′-to-3′ direction) (with the name of the motif in bold immediately preceding the region to which it refers):

(SEQ ID NO: 458)
-pCMV promoter-
TAGTTATTAATAGTAATCAATTACGGGGTCATTAGTTCATAGCCCATATATGGAG
TTCCGCGTTACATAACTTACGGTAAATGGCCCGCCTGGCTGACCGCCCAACGACC
CCCGCCCATTGACGTCAATAATGACGTATGTTCCCATAGTAACGCCAATAGGGAC
TTTCCATTGACGTCAATGGGTGGAGTATTTACGGTAAACTGCCCACTTGGCAGTA
CATCAAGTGTATCATATGCCAAGTACGCCCCCTATTGACGTCAATGACGGTAAAT
GGCCCGCCTGGCATTATGCCCAGTACATGACCTTATGGGACTTTCCTACTTGGCA
GTACATCTACGTATTAGTCATCGCTATTACCATGGTGATGCGGTTTTGGCAGTAC
ATCAATGGGCGTGGATAGCGGTTTGACTCACGGGGATTTCCAAGTCTCCACCCCA
TTGACGTCAATGGGAGTTTGTTTTGGCACCAAAATCAACGGGACTTTCCAAAATG
TCGTAACAACTCCGCCCCATTGACGCAAATGGGCGGTAGGCGTGTACGGTGGGA
GGTCTATATAAGCAGAGCTGGTTTAGTGAACCGTCAGATC-Csy4 loop-
GTTCACTGCCGTATAGGCAG-spacer-GGCCCAGACTGAGCACGTGA-scaffold-
GTTTTAGAGCTAGAAATAGCAAGTTAAAATAAGGCTAGTCCGTTATCAACTTGAA
AAAGTGGGACCGAGTCGGTCC-template-
TGGAGGAAGCAGGGCTTCCTTTCCTCTGCCATCA-insert-
AAATTTCTTTCCATCTTCAAGCATCCCGGTGTAGTGCACCACGCAGGTCTGGCCG
CGCTTGGGGAAGGTGCGCCCGTCTCCTGGGGAGATGGTTTCCACCTGCACTCC-
PBS-CGTGCTCAGTCTG-linker-TTT-MASC ENE-
TAGGGTCATGAAGGTTTTTCTTTTCCTGAGAAAACAACACGTATTGTTTTCTCAGG
TTTTGCTTTTTGGCCTTTTTCTAGCTTAAAAAAAAAAAAAGCAAAAGATGCTGGT
GGTTGGCACTCCTGGTTTCCAGGACGGGGTTCAAATCCCTGCGGCGTCTTTGCTTT
GACT-unrelated plasmid sequence-
TTTTTTTAAGCTTGGGCCGCTCGAGGTAGCAGC-Ubc promoter-
GGCCTCCGCGCCGGGTTTTGGCGCCTCCCGCGGGCGCCCCCCTCCTCACGGCGAG
CGCTGCCACGTCAGACGAAGGGCGCAGGAGCGTTCCTGATCCTTCCGCCCGGAC
GCTCAGGACAGCGGCCCGCTGCTCATAAGACTCGGCCTTAGAACCCCAGTATCA
GCAGAAGGACATTTTAGGACGGGACTTGGGTGACTCTAGGGCACTGGTTTTCTTT
CCAGAGAGCGGAACAGGCGAGGAAAAGTAGTCCCTTCTCGGCGATTCTGCGGAG
GGATCTCCGTGGGGCGGTGAACGCCGATGATTATATAAGGACGCGCCGGGTGTG
GCACAGCTAGTTCCGTCGCAGCCGGGATTTGGGTCGCGGTTCTTGTTTGTGGATC
GCTGTGATCGTCACTTGGTGAGTTGCGGGCTGCTGGGCTGGCCGGGGCTTTCGTG
GCCGCCGGGCCGCTCGGTGGGACGGAAGCGTGTGGAGAGACCGCCAAGGGCTGT
AGTCTGGGTCCGCGAGCAAGGTTGCCCTGAACTGGGGGTTGGGGGGAGCGCACA
AAATGGCGGCTGTTCCCGAGTCTTGAATGGAAGACGCTTGTAAGGCGGGCTGTG
AGGTCGTTGAAACAAGGTGGGGGGCATGGTGGGCGGCAAGAACCCAAGGTCTTG
AGGCCTTCGCTAATGCGGGAAAGCTCTTATTCGGGTGAGATGGGCTGGGGCACC
ATCTGGGGACCCTGACGTGAAGTTTGTCACTGACTGGAGAACTCGGGTTTGTCGT
CTGGTTGCGGGGGCGGCAGTTATGCGGTGCCGTTGGGCAGTGCACCCGTACCTTT
GGGAGCGCGCGCCTCGTCGTGTCGTGACGTCACCCGTTCTGTTGGCTTATAATGC
AGGGTGGGGCCACCTGCCGGTAGGTGTGCGGTAGGCTTTTCTCCGTCGCAGGACG
CAGGGTTCGGGCCTAGGGTAGGCTCTCCTGAATCGACAGGCGCCGGACCTCTGGT
GAGGGGAGGGATAAGTGAGGCGTCAGTTTCTTTGGTCGGTTTTATGTACCTATCT
TCTTAAGTAGCTGAAGCTCCGGTTTTGAACTATGCGCTCGGGGTTGGCGAGTGTG
TTTTGTGAAGTTTTTTAGGCACCTTTTGAAATGTAATCATTTGGGTCAATATGTAA
TTTTCAGTGTTAGACTAGTAAATTGTCCGCTAAATTCTGGCCGTTTTTGGCTTTTT
TGTTAGACAGGATCCCCGGGTACCGGTCGCCACC-Csy4
and
NLS-ATGGGCTCTTTTACTATGGACCACTACCTGGATATTAGACTGAGACCTGACCCTG
AGTTCCCACCCGCCCAGCTGATGAGCGTGCTGTTCGGCAAGCTGCACCAGGCCCT
GGTGGCACAGGGAGGCGACCGGATCGGCGTGAGCTTCCCCGACCTGGATGAGAG
CAGATCCAGGCTGGGAGAGCGCCTGAGGATCCACGCATCCGCCGACGATCTGCG
CGCCCTGCTGGCCCGGCCATGGCTGGAGGGCCTGCGCGACCACCTGCAGTTTGG
AGAGCCAGCAGTGGTGCCACACCCTACCCCATACAGGCAGGTGTCCAGGGTGCA
GGCAAAGTCTAACCCTGAGCGGCTGCGGAGAAGGCTGATGCGCCGGCACGATCT
GTCTGAGGAGGAGGCCAGAAAGAGGATCCCCGACACCGTGGCCAGAACACTGG
ATCTGCCTTTCGTGACCCTGCGGAGCCAGAGCACAGGCCAGCACTTCAGACTGTT
TATCAGGCACGGCCCACTGCAGGTGACAGCCGAGGAAGGAGGATTCACTTGTTA
CGGACTGTCTAAAGGAGGATTCGTGCCCTGGTTCAGCAGCCTGAGGCCTCCTAAG
AAGAAGAGGAAGGTTTAA-SV40 terminator-
TGATCATAATCAAGCCATATCACATCTGTAGAGGTTTACTTGCTTTAAAAAACCT
CCACACCTCCCCCTGAACCTGAAACATAAAATGAATGCAATTGTTGTTGTTAACT
TGTTTATTGCAGCTTATAATGGTTACAAATAAAGCAATAGCATCACAAATTTCAC
AAATAAAGCATTTTTTTCACTGCATTCTAGTTGTGGTTTGTCCAAACTCATCAATG
TATCTTATCATGTCTGGATCTGC.

### Key:

[1341] [pCMV promoter]—binds pol II RNA polymerase
[1342] [Csy4 loop]—bound by Csy4 protein, results in cleavage 3′ of the loop. Required because part of [CMV promoter] is transcribed, and if this sequence is attached 5′ of the gRNA it will lower/eliminate activity (previously known).
[1343] [Spacer sequence] of pegRNA
[1344] [pegRNA scaffold]
[1345] [DNA synthesis template]
[1346] [insertion edit (108 nt from FKBP)]
[1347] [primer binding site]
[1348] [Linker] (highly variable)—connects PBS and terminator element
[1349] [MASC ENE transcription terminator]—transcription of this element results in termination of transcription; a polyA tail is encoded and then sequestered by the ENE element
[1350] [Unimportant sequence]
[1351] [Ubc promoter]—required for expression of the Csy4 protein
[1352] [Csy4 protein and NLS]—required for processing of the 5′ end of the guide. Other strategies could also be used that don't require expression of a large protein (such as ribozyme-mediated cleavage of the spacer), but these would require more individual tuning for different spacer sequences, so we used this.
[1353] [SV40 terminator]—for termination of the Csy4 protein.

### (7) Additional RNA Motifs

[1354] See FIG. 82 for details on certain motifs, such as an HDV ribozyme 3′ of the pegRNA, or G-quadruplex insertion, P1 extensions, template hairpins, and tetraloop circ'd, that may be introduced into a pegRNA to improve its performance.

[1355] In particular, this Example tested the effect of installing a tRNA motif 3′ of the primer binding site. This element was chosen because of multiple potential functions:
[1356] (1) the tRNA motif is a very stable RNA motif, and so could potentially reduce pegRNA degradation;
[1357] (2) the MMLV RT uses a prolyl-tRNA as a primer when converting the viral genome into DNA during transcription, so it was suspected the same cap could be bound by the RT, improving binding of the pegRNA by PE, RNA stability, and bringing the PBS back in closer proximity to the genomic site, potentially also improving activity.

[1358] In these constructs, the P1 of the tRNA (see FIG. 84) was extended. P1 refers to the first stem/base-pairing element of the tRNA (see FIG. 84). This was believed to be necessary to prevent RNAseP-mediated cleavage of the tRNA 5′ of the P1, which would result in its removal from the pegRNA.

[1359] In this design a prolyl-tRNA (codon CGG) with an extended P1 and short 3 nt linker between the tRNA and the PBS was used. A variety of tRNA designs were tested and the editing efficiency was tested compared to a pegRNA having no tRNA cap—see the comparative data in FIG. 83 (depicting a PE experiment that targeted editing of the HEK3 gene, specifically targeting the insertion of a 10 nt insertion at position +1 relative to the nick site and using PE3), FIG. 85 (depicting a PE experiment that targeted editing of the FANCF gene, specifically targeting a G-to-T conversion at position +5 relative to the nick site and using PE3 construct) and FIG. 86 (depicting a PE experiment that targeted editing of the HEK3 gene, specifically targeting the insertion of a 71 nt FLAG tag insertion at position +1 relative to the nick site and using PE3 construct). tRNA-modified pegRNAs were tested against a non-modified pegRNA control.

[1360] UGG/CGG refers to the codon used, the number refers to the length of the added P1 extension, long indicates an 8 nt linker, no designation a 3 nt linker.

[1361] The data suggest that the installation of a tRNA may enable use of shorter PBSs, which would likely result in additional activity improvements. In the case of RNF2, it is possible/likely that the linker used resulted in improved PBS binding to the spacer, and the resulting diminishment in activity.

[1362] Some sequences used:

HEK3 +1 FLAG-tag insertion, proly-tRNA
{UGG} P1 ext 5 nt, linker 3 nt
(SEQ ID NO: 459)
GGCCCAGACUGAGCACGUGAGUUUUAGAGCUAGAA
AUAGCAAGUUAAAAUAAGGCUAGUCCGUUAUCAA
CUUGAAAAAGUGGCACCGAGUCGGUGCUGGAGGAA
GCAGGGCUUCCUUUCCUCUGCCAUCACUUAUCGUC
GUCAUCCUUGUAAUCCGUGCUCAGUCUGUCUGGCG
GGGCUCGUUGGUCUAGGGGUAUGAUUCUCGCUUCG
GGUGCGAGAGGUCCCGGGUUCAAAUCCCGGACGAG
CCCCGCCUUUU
FANCF +5 G to T proly-tRNA {CGG}+10
P1 ext 5 nt, linker 3 nt
(SEQ ID NO: 460)
GGAAUCCCUUCUGCAGCACCGUUUUAGAGCUAGAA
AUAGCAAGUUAAAAUAAGGCUAGUCCGUUAUCAA
CUUGAAAAAGUGGCACCGAGUCGGUGCGGAAAAGC
GAUCAAGGUGCUGCAGAAGGGAUCUGGCGGGGCUC
GUUGGUCUAGGGGUAUGAUUCUCGCUUCGGGUGCG
AGAGGUCCCGGGUUCAAAUCCCGGACGAGCCCCGC
CUUUU
HEK3 ++1 10 nt insertion, proly-tRNA
{UGG} P1 ext 5 nt, linker 3 nt
(SEQ ID NO: 461)
GGCCCAGACUGAGCACGUGAGUUUUAGAGCUAGAA
AUAGCAAGUUAAAAUAAGGCUAGUCCGUUAUCAA
CUUGAAAAAGUGGGACCGAGUCGGUCCUCUGCCAU
CAAAGCUUCGACCGUGCUCAGUCUUCUGCUCGAGG
CGGGGCUCGUUGGUCUAGGGGUAUGAUUCUCGCUU
CGGGUGCGAGAGGUCCCGGGUUCAAAUCCCGGACG
AGCCCCGCCUCGAGCUUUU

[1363] The sequences reported in the data of FIGS. 85 and 86 are as follows:

FANCF +5 G to T pegRNA sequence:
space, scaffold template and PBSr-
GGAAUCCCUUCUGCAGCACCGUUUUAGAGCUAGAAAUAGCAAGUUAAAAUA
AGGCUAGUCCGUUAUCAACUUGAAAAAGUGGCACCGAGUCGGUGCGGAAAA
GCGAUCAAGGUGCUGCAGAAGGGA-partial CGG tRNA linker 8-
UCUCUCUCUGGUCUAGGGGUAUGAUUCUCGCUUCGGGUGCGAGAGGUCCCG
GGUUCAAUUUU
(SEQ ID NO: 462)
FANCF +5 G to T pegRNA sequence:
space, scaffold template and PBSr-
GGAAUCCCUUCUGCAGCACCGUUUUAGAGCUAGAAAUAGCAAGUUAAAAUA
AGGCUAGUCCGUUAUCAACUUGAAAAAGUGGCACCGAGUCGGUGCGGAAAA
GCGAUCAAGGUGCUGCAGAAGGGA-UGG P1 ext 5 linker 3-
UCUGGCGGGGCUCGUUGGUCUAGGGGUAUGAUUCUCGCUUUGGGUGCGAGA
GGUCCCGGGUUCAAAUCCCGGACGAGCCCCGCCUUUU
(SEQ ID NO: 463)
FANCF +5 G to T pegRNA sequence:
space, scaffold template and PBSr-
GGAAUCCCUUCUGCAGCACCGUUUUAGAGCUAGAAAUAGCAAGUUAAAAUA
AGGCUAGUCCGUUAUCAACUUGAAAAAGUGGCACCGAGUCGGUGCGGAAAA
GCGAUCAAGGUGCUGCAGAAGGGA-UGG P1 ext 5 linker 8-
UCUCUCUCGGCGGGGCUCGUUGGUCUAGGGGUAUGAUUCUCGCUUUGGGUG
CGAGAGGUCCCGGGUUCAAAUCCCGGACGAGCCCCGCCUUUU
(SEQ ID NO: 464)
FANCF +5 G to T pegRNA sequence:
space, scaffold template and PBSr-
GGAAUCCCUUCUGCAGCACCGUUUUAGAGCUAGAAAUAGCAAGUUAAAAUA
AGGCUAGUCCGUUAUCAACUUGAAAAAGUGGCACCGAGUCGGUGCGGAAAA
GCGAUCAAGGUGCUGCAGAAGGGA-UGG P1 ext 8 linker 3-
UCUCGAGGCGGGGCUCGUUGGUCUAGGGGUAUGAUUCUCGCUUUGGGUGCG
AGAGGUCCCGGGUUCAAAUCCCGGACGAGCCCCGCCUCGUUUU
(SEQ ID NO: 465)
FANCF +5 G to T pegRNA sequence:
space, scaffold template and PBSr-
GGAAUCCCUUCUGCAGCACCGUUUUAGAGCUAGAAAUAGCAAGUUAAAAUA
AGGCUAGUCCGUUAUCAACUUGAAAAAGUGGCACCGAGUCGGUGCGGAAAA
GCGAUCAAGGUGCUGCAGAAGGGA-UGG P1 ext 8 linker 8-
UCUCUCUCCGAGGCGGGGCUCGUUGGUCUAGGGGUAUGAUUCUCGCUUUGG
GUGCGAGAGGUCCCGGGUUCAAAUCCCGGACGAGCCCCGCCUCGUUUU
(SEQ ID NO: 466)
FANCF +5 G to T pegRNA sequence:
space, scaffold template and PBSr-
GGAAUCCCUUCUGCAGCACCGUUUUAGAGCUAGAAAUAGCAAGUUAAAAUA
AGGCUAGUCCGUUAUCAACUUGAAAAAGUGGCACCGAGUCGGUGCGGAAAA
GCGAUCAAGGUGCUGCAGAAGGGA-UGG P1 ext 11 linker 3-
UCUGCUCGAGGCGGGGCUCGUUGGUCUAGGGGUAUGAUUCUCGCUUUGGGU
GCGAGAGGUCCCGGGUUCAAAUCCCGGACGAGCCCCGCCUCGAGCUUUU
(SEQ ID NO: 467)
FANCF +5 G to T pegRNA sequence:
space, scaffold template and PBSr-
GGAAUCCCUUCUGCAGCACCGUUUUAGAGCUAGAAAUAGCAAGUUAAAAUA
AGGCUAGUCCGUUAUCAACUUGAAAAAGUGGCACCGAGUCGGUGCGGAAAA
GCGAUCAAGGUGCUGCAGAAGGGA-UGG P1 ext 11 linker 8-
UCUCUCUCGCUCGAGGCGGGGCUCGUUGGUCUAGGGGUAUGAUUCUCGCUU
UGGGUGCGAGAGGUCCCGGGUUCAAAUCCCGGACGAGCCCCGCCUCGAGCU
UUU
(SEQ ID NO: 468)
HEK3 +1 10 nt insertion pegRNA sequence:
space, scaffold template and PBSr-
GGCCCAGACTGAGCACGTGAGTTTTAGAGCTAGAAATAGCAAGTTAAAATA
AGGCTAGTCCGTTATCAACTTGAAAAAGTGGCACCGAGTCGGTGCTCTGCC
ATCAAAGCTTCGACCGTGCTCAGTCTG-UGG P1 ext 5 linker 3-
UCUGGCGGGGCUCGUUGGUCUAGGGGUAUGAUUCUCGCUUUGGGUGCGAGA
GGUCCCGGGUUCAAAUCCCGGACGAGCCCCGCCUUUU
(SEQ ID NO: 469)
HEK3 +1 FLAG insertion pegRNA sequence:
space, scaffold template and PBSr-
GGCCCAGACUGAGCACGUGAGUUUUAGAGCUAGAAAUAGCAAGUUAAAAUA
AGGCUAGUCCGUUAUCAACUUGAAAAAGUGGCACCGAGUCGGUGCUGGAGG
AAGCAGGGCUUCCUUUCCUCUGCCAUCACUUAUCGUCGUCAUCCUUGUAAU
CCGUGCUCAGUCUG-partial CGG tRNA linker 8-
UCUCUCUCUGGUCUAGGGGUAUGAUUCUCGCUUCGGGUGCGAGAGGUCCCG
GGUUCAAUUUU
(SEQ ID NO: 470)
HEK3 +1 FLAG insertion pegRNA sequence:
space, scaffold template and PBSr-
GGCCCAGACUGAGCACGUGAGUUUUAGAGCUAGAAAUAGCAAGUUAAAAUA
AGGCUAGUCCGUUAUCAACUUGAAAAAGUGGCACCGAGUCGGUGCUGGAGG
AAGCAGGGCUUCCUUUCCUCUGCCAUCACUUAUCGUCGUCAUCCUUGUAAU
CCGUGCUCAGUCUG-UGG P1 ext 5 linker 3-
UCUGGCGGGGCUCGUUGGUCUAGGGGUAUGAUUCUCGCUUUGGGUGCGAGA
GGUCCCGGGUUCAAAUCCCGGACGAGCCCCGCCUUUU
(SEQ ID NO: 471)
HEK3 +1 FLAG insertion pegRNA sequence:
space, scaffold template and PBSr-
GGCCCAGACUGAGCACGUGAGUUUUAGAGCUAGAAAUAGCAAGUUAAAAUA
AGGCUAGUCCGUUAUCAACUUGAAAAAGUGGCACCGAGUCGGUGCUGGAGG
AAGCAGGGCUUCCUUUCCUCUGCCAUCACUUAUCGUCGUCAUCCUUGUAAU
CCGUGCUCAGUCUG-UGG P1 ext 5 linker 8-
UCUCUCUCGGCGGGGCUCGUUGGUCUAGGGGUAUGAUUCUCGCUUUGGGUG
CGAGAGGUCCCGGGUUCAAAUCCCGGACGAGCCCCGCCUUUU
(SEQ ID NO: 472)
HEK3 +1 FLAG insertion pegRNA sequence:
space, scaffold template and PBSr-
GGCCCAGACUGAGCACGUGAGUUUUAGAGCUAGAAAUAGCAAGUUAAAA
UAAGGCUAGUCCGUUAUCAACUUGAAAAAGUGGCACCGAGUCGGUGCUGG
AGGAAGCAGGGCUUCCUUUCCUCUGCCAUCACUUAUCGUCGUCAUCCUUG
UAAUCCGUGCUCAGUCUG-UGG P1 ext 8 linker 8-
UCUCUCUCCGAGGCGGGGCUCGUUGGUCUAGGGGUAUGAUUCUCGCUUUG
GGUGCGAGAGGUCCCGGGUUCAAAUCCCGGACGAGCCCCGCCUCGUUUU
(SEQ ID NO: 473)
HEK3 +1 FLAG insertion pegRNA sequence:
space, scaffold template and PBSr-
GGCCCAGACUGAGCACGUGAGUUUUAGAGCUAGAAAUAGCAAGUUAAAAUA
AGGCUAGUCCGUUAUCAACUUGAAAAAGUGGCACCGAGUCGGUGCUGGAGG
AAGCAGGGCUUCCUUUCCUCUGCCAUCACUUAUCGUCGUCAUCCUUGUAAU
CCGUGCUCAGUCUG-UGG P1 ext 11 linker 8-
UCUCUCUCGCUCGAGGCGGGGCUCGUUGGUCUAGGGGUAUGAUUCUCGCUU
UGGGUGCGAGAGGUCCCGGGUUCAAAUCCCGGACGAGCCCCGCCUCGAGCU
UUU
(SEQ ID NO: 474)
HEK3 +1 FLAG insertion pegRNA sequence:
space, scaffold template and PBSr-
GGCCCAGACUGAGCACGUGAGUUUUAGAGCUAGAAAUAGCAAGUUAAAAUA
AGGCUAGUCCGUUAUCAACUUGAAAAAGUGGCACCGAGUCGGUGCUGGAGG
AAGCAGGGCUUCCUUUCCUCUGCCAUCACUUAUCGUCGUCAUCCUUGUAAU
CCGUGCUCAGUCUG-UGG P1 ext 14 linker 8-
UCUCUCUCGGUGCUCGAGGCGGGGCUCGUUGGUCUAGGGGUAUGAUUCUCG
CUUUGGGUGCGAGAGGUCCCGGGUUCAAAUCCCGGACGAGCCCCGCCUCGA
GCACCUUUU
(SEQ ID NO: 475)
RNF2 +1 C to A pegRNA sequence:
space, scaffold template and PBSr-
GUCAUCUUAGUCAUUACCUGGUUUUAGAGCUAGAAAUAGCAAGUUAAAAUA
AGGCUAGUCCGUUAUCAACUUGAAAAAGUGGCACCGAGUCGGUGCGAACAC
CUCAUGUAAUGACUAAGAUG-tRNA-Pro{CGG}-5-
UCUGGCGGGGCUCGUUGGUCUAGGGGUAUGAUUCUCGCUUCGGGUGCGAGA
GGUCCCGGGUUCAAAUCCCGGACGAGCCCCGCC
(SEQ ID NO: 476)
RNF2 +1 C to A pegRNA sequence:
space, scaffold template and PBSr-
GUCAUCUUAGUCAUUACCUGGUUUUAGAGCUAGAAAUAGCAAGUUAAAAUA
AGGCUAGUCCGUUAUCAACUUGAAAAAGUGGCACCGAGUCGGUGCGAACAC
CUCAUGUAAUGACUAAGAUG-tRNA-Pro{CGG}-8-
UCUCGAGGCGGGGCUCGUUGGUCUAGGGGUAUGAUUCUCGCUUCGGGUGCG
AGAGGUCCCGGGUUCAAAUCCCGGACGAGCCCCGCCUCGUUUU
(SEQ ID NO: 477)
RNF2 +1 C to A pegRNA sequence:
space, scaffold template and PBSr-
GUCAUCUUAGUCAUUACCUGGUUUUAGAGCUAGAAAUAGCAAGUUAAAAUA
AGGCUAGUCCGUUAUCAACUUGAAAAAGUGGCACCGAGUCGGUGCGAACAC
CUCAUGUAAUGACUAAGAUG-tRNA-Pro{CGG}-11-
UCUGCUCGAGGCGGGGCUCGUUGGUCUAGGGGUAUGAUUCUCGCUUCGGGU
GCGAGAGGUCCCGGGUUCAAAUCCCGGACGAGCCCCGCCUCGAGCUUUU
(SEQ ID NO: 478)
RNF2 +1 C to A pegRNA sequence:
space, scaffold template and PBSr-
GUCAUCUUAGUCAUUACCUGGUUUUAGAGCUAGAAAUAGCAAGUUAAAAUA
AGGCUAGUCCGUUAUCAACUUGAAAAAGUGGCACCGAGUCGGUGCGAACAC
CUCAUGUAAUGACUAAGAUG-tRNA-Pro{Lys}-5-
UCUGGCGGGCCCGGAUAGCUCAGUCGGUAGAGCAUCAGACUUUUAAUCUGA
GGGUCCAGGGUUCAAGUCCCUGUUCGGGCCCGCCUUUU
(SEQ ID NO: 479)
RNF2 +1 C to A pegRNA sequence:
space, scaffold template and PBSr-
GUCAUCUUAGUCAUUACCUGGUUUUAGAGCUAGAAAUAGCAAGUUAAAAUA
AGGCUAGUCCGUUAUCAACUUGAAAAAGUGGCACCGAGUCGGUGCGAACAC
CUCAUGUAAUGACUAAGAUG-tRNA-Pro{Lys}-8-
UCUCGAGGCGGGCCCGGAUAGCUCAGUCGGUAGAGCAUCAGACUUUUAAUC
UGAGGGUCCAGGGUUCAAGUCCCUGUUCGGGCCCGCCUCGUUUU
(SEQ ID NO: 480)
RNF2 +1 C to A pegRNA sequence:
space, scaffold template and PBSr-
GUCAUCUUAGUCAUUACCUGGUUUUAGAGCUAGAAAUAGCAAGUUAAAAUA
AGGCUAGUCCGUUAUCAACUUGAAAAAGUGGCACCGAGUCGGUGCGAACAC
CUCAUGUAAUGACUAAGAUG-tRNA-Pro{UGG}-8-
UCUCGAGGCGGGGCUCGUUGGUCUAGGGGUAUGAUUCUCGCUUUGGGUGCG
AGAGGUCCCGGGUUCAAAUCCCGGACGAGCCCCGCCUCGUUUU
(SEQ ID NO: 481)
RNF2 +1 C to A pegRNA sequence:
space, scaffold template and PBSr-
GUCAUCUUAGUCAUUACCUGGUUUUAGAGCUAGAAAUAGCAAGUUAAAAUA
AGGCUAGUCCGUUAUCAACUUGAAAAAGUGGCACCGAGUCGGUGCGAACAC
CUCAUGUAAUGACUAAGAUG-tRNA-Pro{UGG}-11-
UCUGCUCGAGGCGGGGCUCGUUGGUCUAGGGGUAUGAUUCUCGCUUUGGGU
GCGAGAGGUCCCGGGUUCAAAUCCCGGACGAGCCCCGCCUCGAGCUUUU
(SEQ ID NO: 482)
RNF2 +1 C to A pegRNA sequence:
space, scaffold template and PBSr-
GUCAUCUUAGUCAUUACCUGGUUUUAGAGCUAGAAAUAGCAAGUUAAAAUA
AGGCUAGUCCGUUAUCAACUUGAAAAAGUGGCACCGAGUCGGUGCGAACAC
CUCAUGUAAUGACUAAGAUG-tRNA-Pro{UGG}-8-longer linker-
UCUCUCUCCGAGGCGGGGCUCGUUGGUCUAGGGGUAUGAUUCUCGCUUUGG
GUGCGAGAGGUCCCGGGUUCAAAUCCCGGACGAGCCCCGCCUCGUUUU
(SEQ ID NO: 483)
RNF2 +1 C to A pegRNA sequence:
space, scaffold template and PBSr-
GUCAUCUUAGUCAUUACCUGGUUUUAGAGCUAGAAAUAGCAAGUUAAAAUA
AGGCUAGUCCGUUAUCAACUUGAAAAAGUGGCACCGAGUCGGUGCGAACAC
CUCAUGUAAUGACUAAGAUG-tRNA-Pro{UGG}-11-longer linker-
UCUCUCUCGCUCGAGGCGGGGCUCGUUGGUCUAGGGGUAUGAUUCUCGCUU
UGGGUGCGAGAGGUCCCGGGUUCAAAUCCCGGACGAGCCCCGCCUCGAGCUU
UU
(SEQ ID NO: 484)
RNF2 +1 C to A pegRNA sequence:
space, scaffold template and PBSr-
GUCAUCUUAGUCAUUACCUGGUUUUAGAGCUAGAAAUAGCAAGUUAAAAUA
AGGCUAGUCCGUUAUCAACUUGAAAAAGUGGCACCGAGUCGGUGCGAACAC
CUCAUGUAAUGACUAAGAUG-tRNA-Pro{UGG}-14-longer linker-
UCUCUCUCGGUGCUCGAGGCGGGGCUCGUUGGUCUAGGGGUAUGAUUCUCG
CUUUGGGUGCGAGAGGUCCCGGGUUCAAAUCCCGGACGAGCCCCGCCUCGA
GCACCUUUU
(SEQ ID NO: 485)

### Example 3: Next-Generation PEGRNA Modifications for Improving Prime Editing Efficiency

### Background

[1364] The prime editor complex consists of two components. The first, the prime editor (PE) itself, in one embodiment, is a programmable nuclease, such as Streptococcus pyogenes Cas9 (SpCas9), fused to a polymerase, such as a reverse transcriptase, and which bears a mutation that inactivates the HNH nuclease domain. The second component is a pegRNA that both targets the editor to a programmed genomic site and contains the template used by the reverse transcriptase to install the programmed edit. Despite its power to create virtually any programmable edit, PE generally has lower activity than base editors (BE) for comparable edits. It is considered that rational engineering of the pegRNA could also lead to improved editing outcomes and enable a wider variety of prime edits in the genomes of cells, e.g., in non-HEK293T cell lines.

[1365] It is considered that pegRNAs suffer from both reduced Cas9 affinity and reduced stability relative to canonical single guide RNAs (sgRNAs). This reduction in Cas9 affinity is likely due not only to a 3′ extension, but also due to formation of an RNA duplex between the spacer and primer binding site (PBS) that would inhibit Cas9 binding. Indeed, longer PBS lengths completely obviate PE activity at all sites tested, presumably through this mechanism. Additionally, transfection of pegRNA with SpCas9 nuclease results in fewer indels than sgRNAs targeting the same site, further suggesting that the 3′ extension reduces Cas9 binding and, potentially, catalytic activity. It also seemed likely that the 3′ extension, not being bound and protected by Cas9, could potentially be degraded by exonucleases or be bound by other cellular factors that could compete with Cas9 or RT binding, or otherwise inhibit prime editing. Indeed, upon examining the cellular lifespan of pegRNAs via RT-qPCR, it was observed a significant decrease in stability for the 3′ extension relative to the scaffold region (FIG. 90A-C).

Existing sgRNA Improvement Strategies

[1366] Numerous modifications to sgRNAs that improve editing in human cells have been reported. Among the most common such modifications are the ‘flip’ and ‘extension’ mutations to the sgRNA scaffold. It has previously been noted that a four uridine (U) nucleotide stretch in the direct repeat (DR) of the scaffold is a possible polymerase III (pol III) termination sequence, and that flipping of the terminal uridine•adenosine (A) basepair for an A•U basepair results in increased expression and activity of sgRNAs. Similarly, extension of the DR has also been shown to improve sgRNA activity, presumably via stabilization of the Cas9-binding competent structure of the sgRNA. It has been found that such modifications can increase pegRNA activity, just as they have for sgRNA activity (FIG. 91A-D). This is likely due to efficient transfection of the pegRNA-encoding plasmid in HEK293T cells, and it would be expected that these modifications broadly improve activity in other cell types. Another modification sought was to reduce interaction between the spacer and PBS via incorporation of toehold stems.

Next-Generation sgRNA Improvement Strategies

[1367] Given the above findings, it was decided to focus on strategies to improve the stability of the 3′ extension. Degradation of the PBS is especially deleterious for pegRNAs because any degradation renders the pegRNA unable to be bound by the RT but could still enable binding by Cas9. Thus, degraded pegRNAs can compete both for Cas9 and for binding to the targeted site, as well as still enable nicking at the site, potentially reducing editing and increasing indel formation.

[1368] Thus, it was discovered that the incorporation of structural motifs 3′ of the PBS could lead to improved stability as has been reported for RNA G-quadruplexes appended to sgRNAs. However, it was also decided to screen additional structural motifs since purine-rich sequences could potentially lead to misfolding of the pegRNA. Accordingly, several other structural motifs appended to the PBS by a short, unstructured nucleotide linker were screened.

[1369] First, a prequeosine₁-1 riboswitch aptamer—one of the smallest natural tertiary RNA structures—that had been evolved to be more stable, hereafter termed evopreQ₁-1. Second, two structural motifs that could possibly interact with the MMLV RT and thereby result in both improved stability and affinity to PE were selected, namely, the pseudoknot from the MMLV viral genome (here referred to as Mpknot-1) and a modified tRNA that is used by the MMLV RT as a primer for reverse transcription.

[1370] The test assay involved screening pegRNA guides configured to encode a FLAG tag insertion sequence—a challenging edit—to be installed at a variety of genomic loci (FIG. 92A-C). Intriguingly, a significant increase in editing activity was observed for a short (G2) quadruplex, as well as both evopreQ1-1 and Mpknot-1 at all sites tested in HEK293T cells, suggesting that these motifs improve activity at a variety of genomic loci.

[1371] It was considered that appending structural motifs to the 3′ end of the pegRNA might only improve activity for pegRNAs with longer extensions. To determine if this was the case, a small library of pegRNAs that encode either point mutations or deletions and contain templates of increasing length at 6 additional genomic sites was screened. Broadly improved editing was observed for virtually all guides tested (FIG. 93A-H), with improvement ranging from 1.5-6 fold, irrespective of site, edit type or template length, suggesting their general utility. Interestingly, although incorporation of structural motifs resulted in improved editing versus addition of linker alone, addition of a linker often resulted in improved editing activity relative to the parent pegRNA (FIG. 94). To determine if these structure-tagged pegRNAs result in improved editing in other cell lines, the ability of modified pegRNAs to install a FLAG tag at the HEK3 locus in K562, U20S, and HeLa cells was tested. Large improvements in editing efficacy was observed in these cells when appending either an evopreQ1-1 or Mpknot-1 pseudoknot 3′ of the PBS (FIG. 95A-B).

[1372] In order to improve the initial design, it was sought to understand how these motifs were improving activity. Although it seemed likely that they would function via improved cellular lifespan, it was observed that addition of a short, unstructured linker was sometimes sufficient to improve pegRNA activity relative to the parent pegRNA (FIG. 94). Simultaneously, mutations predicted to disrupt the motif structure resulted in reduced editing (FIG. 96) evoPreQ1(mut1) and evoPreQ1(mut2), suggesting that the structure of the motif is important for activity. This in turn suggested that there might be multiple possible mechanisms by which these motifs were increasing PE efficiency.

[1373] As a first step, it was sought to confirm that the modified pegRNAs improve the cellular lifetime of pegRNAs. So far, RT-qPCR was used to measure the relative amount of pegRNA scaffold and template, and it was found that appending structured motifs to the 3′ tail of the pegRNA lead to significantly improved amounts of template (FIG. 97). It is considered that the PBS length of these pegRNAs might be able to be increased, further improving editing activity.

[1374] It is considered that further improvements to the design of these next generation pegRNAs can be made. To do so, a number of additional 3′ motifs will be screened. These include additional evolved preq1—aptamers, modifications to Mpknot-1, additional natural G-quadruplexes with improved stability, the P4-P6 domain of the group I intron, and the self-cleaving HDV ribozyme. This ribozyme results in RNA processing immediately 5′ of itself, leaving a 2′-3′-cyclicphosphate at the 3′ terminus of the RNA that is resistant to exonucleases. In addition, mutations to the canonical sgRNA scaffold will be tested that have been reported to increase editing efficacy for Cas9 nuclease cutting to see if they improve activity in HEK cells and in other cell types.

[1375] These studies have involved a the linker length of 8 nucleotides (nt), however, other linker lengths are possible, including for example, 4, 5, 6, 9, 10, 11, 12, 13, 14, 15, 16, 17, 18, 19, 20, 21, 22, 23, 24, 25, 26, 27, 28, 29, 30, 31, 32, 33, 34, 35, 36, 37, 38, 39, or 40 or more nucleotides can be used. In some cases, linker length and sequence will have to be empirically determined for each site. In other cases, a single linker may be used that is pegRNA sequence-agnostic. To aid in this process, a computational script may be used for designing linker sequences that do not interfere with pegRNA structure.

### Additional Designs

[1376] As a final step, additional designs of pegRNA were sought. Several aspects of pegRNA structure were considered, including: the pol III promoter used to express pegRNAs, the pegRNA scaffold, and the nicking guide used in PE3 to enhance editing efficacy by nicking the opposing strand. A variety of pol III promoters have been used to express small RNAs in human cells. Historically, two—u6 and h1—have been used for the expression of pre-microRNAs. Of these two, u6 was found to be superior for sgRNA expression. However, other promoters can lead to improved expression of pegRNAs. To determine if this were the case, a number of pol III promoters were screened, including hi and other homologs of u6 for editing efficacy in HEK293T cells. Several promoters, including one homolog of u6 termed u6-9, were found to drastically improve editing efficacy (see FIG. 100A-100E). These promoters are identified as:

[1377] Non-limiting examples of U6 promoters include those represented by SEQ ID NOs: 237-240.

### Conclusions

[1378] Apart from generally improving PE activity, the modified pegRNAs could simplify the process of designing pegRNAs. Currently, the design of optimal pegRNAs can often require screening 10s-100s of pegRNA constructs. Such testing is especially time-consuming, expensive, and not feasible when constructing a library of pegRNAs. One potential application of such libraries is the systematic tagging of all proteins in a given set. A significant benefit of the modified pegRNAs described herein is that they simplify pegRNA design by limiting the negative effect of poor template choices, as seen for editing at HEK3 (FIG. 93B; FIG. 93E). Additionally, if 3′ motifs enable lengthening the PBS to its maximum possible length (17), this should greatly simplify pegRNA design.

[1379] In conclusion, the design of modified pegRNAs with improved editing activity having been validated. These pegRNAs contain a structured RNA 3′ of the PBS and their improved activity is derived from improved cellular lifespan and Cas9 binding activity. These modifications broadly improve PE activity at a wide variety of genomic loci, encoded edits, and cell types.

### Example 4: Engineered pegRNAS that Improve Prime Editing Efficiency

[1380] The ability to make targeted changes to the genome of living systems continues to advance the life sciences and medicine. Double-strand break (DSB)-mediated DNA editing strategies that use programmable nucleases such as ZFNs, TALENs, or CRISPR-Cas nucleases can efficiently disrupt genes by inducing insertions or deletions (indels) at the target site, but DSBs also result in outcomes that are often undesired, including uncontrolled mixtures of editing outcomes^{1,2}, larger DNA rearrangements³⁻⁵, p53 activation⁶⁻⁸, and chromothrypsis^{9,10}. Although targeted DSBs can stimulate precise gene correction through homology-directed repair, the process is inefficient in most therapeutically relevant cell types¹¹. In contrast, base editors^{12,13} and prime editors¹⁴ can of efficiently install precise changes in therapeutically relevant cells without requiring DSBs. Cytosine and adenosine base editors enable the conversion of C•G to T•A, and A•T to G•C, respectively, while prime editors enable the installation of virtually any local mutation, including the substitution, insertion, and/or deletion of up to dozens of base pairs at targeted DNA sites.

[1381] Prime editing (PE) systems minimally consist of two components: a protein containing a programmable DNA nickase fused to an engineered reverse transcriptase (RT), and a prime editing guide RNA, or pegRNA (FIG. 104A)¹⁴. The pegRNA contains a spacer that specifies the target site, an sgRNA scaffold, and a 3′ extension that encodes the desired edit. This extension contains a primer-binding site (PBS) that is complementary to a portion of the DNA protospacer, and an RT template that encodes the desired edit and downstream genomic sequence. After the PE ribonucleoprotein (RNP) binds the target site and nicks the PAM-containing DNA strand, the resulting nicked DNA strand base pairs to the PBS in the pegRNA, priming the reverse transcription of the RT template directly into the target DNA site¹⁴. The newly synthesized 3′ flap of edited DNA is then resolved by cellular DNA repair pathways, leading to installation of the desired edit at the target site.

[1382] The versatility of prime editing arises from the ability of the 3′ extension of the pegRNA to encode a wide variety of edited sequences. Despite its versatility, the efficiency of current prime editors varies substantially among target sites and cell types¹⁴. In this example, it is described that putative degradation of the 3′ extension of pegRNAs can erode prime editing efficiency. Although the resulting truncated pegRNAs compete for target site engagement, they are incompetent for prime editing. To address this vulnerability, RNA motifs that protect pegRNA integrity and broadly improve prime editing efficiencies were identified at a variety of target sites in multiple cell lines and via multiple delivery modalities. The resulting engineered pegRNAs (epegRNAs) substantially advanced the effectiveness, and the application scope, of prime editing.

### Results

[1383] RNA Stability Limits pegRNA Efficacy

[1384] Unprotected nuclear RNAs are susceptible to degradation from both the 5′ and 3′ termini by exonucleasesis. In contrast to sgRNAs in which the entire guide RNA is protected by an associated Cas9 protein¹⁶, the 3′ extension of pegRNAs is likely to be exposed in cells and thus more susceptible to exonucleolytic degradation. While partially degraded pegRNAs can retain their ability to bind Cas9 and engage the target DNA site, loss or truncation of the PBS might prevent their ability to install the desired edit, thereby occupying PE proteins and target sites with guide RNAs that cannot mediate prime editing.

[1385] To demonstrate this possibility, HEK293T cells were transfected with mixtures of two plasmids in varying ratios that generate either a full-length pegRNA containing an RT template encoding a T•A-to-A•T transversion, or a truncated pegRNA containing an RT template encoding a T•A-to-G•C transversion but lacking the PBS at the 3′ terminus. The two pegRNAs targeted either the same or different genomic loci in human cells. The effect of adding a plasmid that generated a non-interacting SaCas9 pegRNA that should compete for transcription with the SpCas9 pegRNA-encoding plasmids, but not interact with the prime editor protein, was also tested. Increasing the production of truncated pegRNA inhibited PE activity when the full-length and truncated pegRNAs were targeted to the same site (FIG. 104B). In contrast, neither a truncated pegRNA targeted to a different genomic site nor a non-targeting SpCas9 sgRNA impeded PE activity any more than the SaCas9 pegRNA (FIG. 104B). These data suggest that degraded pegRNAs with truncated 3′ extensions inhibit PE activity by enabling editing-incompetent prime editor ribonucleoproteins (RNPs) to compete for the targeted genomic locus.

Design of Engineered pegRNAs (epegRNAs) that Improve Prime Editing Efficiency

[1386] Having identified truncated pegRNAs as a potent inhibitor of prime editing, it was next sought to minimize pegRNA degradation. It was envisioned that structured RNA motifs at the 3′ end of the pegRNA might improve pegRNA stability, consistent with the ability of RNA structures at the 5′ or 3′ termini to enhance mRNA stability in human cells and in yeast^{17,18}. For instance, the long-noncoding RNA MALAT1 is stabilized by a triple helix that sequesters its poly(A) tail, limiting both degradation and nuclear export¹⁹.

[1387] Whether prime editing efficiency could be improved by incorporating additional RNAstructures was tested using one of two stable pseudoknots at the 3′ end of the pegRNA: either a modified prequeosine1-1 riboswitch aptamer20,21, (evopreQ1), or the frameshifting pseudoknot from Moloney murine leukemia virus (MMLV)22, hereafter referred to as “mpknot” (FIG. 108). EvopreQ1 was chosen because it is one of the smallest naturally derived RNA structural motifs with a defined tertiary structure (42 nucleotides, nt, in length)^{20,21}. It was reasoned that smaller motifs would minimize the formation of secondary structures that could interfere with pegRNA function. Furthermore, shorter pegRNAs can be more easily produced by chemical synthesis. Mpknot was chosen because of its tertiary structure and because it is an endogenous a template for the MMLV RT from which the RT in canonical prime editors was engineered, raising the possibility that mpknot might help recruit the RT.

[1388] It was tested if these epegRNAs could insert a FLAG epitope tag sequence using PE3 at five genomic loci in HEK293T cells (FIG. 105A). To reduce the potential for the motif to interfere with pegRNA function during prime editing, an 8-nt linker was included to connect either evopreQ₁ or mpknot to the 3′ end of the epegRNA PBS. Linker sequences were designed using ViennaRNA²³ to avoid potential base pairing interactions between the linker and PBS, or between the linker and the pegRNA spacer¹⁴. An average of 2.1-fold increased efficiency of FLAG tag insertion was observed when using epegRNAs compared to canonical pegRNAs across all five genomic sites tested, with no apparent change in edit:indel ratios (FIGS. 109A-109C), suggesting that 3′ terminal pseudoknot motifs can improve PE efficacy.

[1389] The role of the linker sequence in editing efficiency was characterized by comparing the ability of epegRNAs with or without 8-nt linkers to mediate transversions or FLAG tag insertions. A decrease in PE3 editing efficiency was observed upon removing the linker for epegRNAs containing the mpknot (p=0.022), but no significant difference for epegRNAs that contain evopreQ₁ was observed (FIG. 110), perhaps because evopreQ1 is smaller than mpknot and is less prone to steric clashes with the RT. While the overall average editing efficiencies for epegRNAs with evopreQ₁ were similar (with or without a linker) occasional reduced performance for epegRNAs without a linker were noted (FIG. 110). Therefore, an 8-nt linker was used unless otherwise noted for all subsequent epegRNA designs.

[1390] To ensure that this improvement in PE efficacy was not limited to epegRNAs with longer extensions, 148 additional epegRNAs were tested that encoded a variety of point mutations or deletions with various RT template lengths at seven different genomic sites in HEK293T cells using PE3. Use of either motif resulted in a 1.5-fold average improvement in prime editing efficiency relative to that of canonical pegRNAs across all tested sites and pegRNAs in HEK293T cells, with no apparent change in edit:indel ratios (FIGS. 105B-105C, FIGS. 111A-111K, and FIGS. 112A-112C). Together, these results establish that epegRNAs broadly improve PE efficacy in HEK293T cells.

Engineered pegRNAs Improve Prime Editing in Multiple Mammalian Cell Lines

[1391] It was previously observed that PE efficiency varies substantially between mammalian cell types¹⁴, highlighting the need to test improved PE systems in a variety of cells. The ability of epegRNAs containing a 3′ evopreQ₁ or mpknot motif to insert a 24-bp FLAG epitope tag at HEK3, delete 15 bp at DNMT1, or install a C•G-to-A•T transversion at RNF2 via PE3 in K562, U2OS, and HeLa cells were tested. In each of these cell lines, epegRNAs resulted in large improvements in editing efficiency compared to pegRNAs, averaging 2.4-fold higher editing in K562 cells, 3.1-fold higher editing in HeLa cells, and 5.6-fold higher editing in U2OS cells across all tested edits (FIG. 105D) with no decrease in edit:indel ratios (FIGS. 109A-109C). These results indicate that epegRNAs can be used to enhance prime editing in multiple mammalian cell lines. Additionally, epegRNAs improved editing efficiencies to a greater degree in non-HEK293T cells than in HEK293T cells, (FIG. 105A and FIG. 111A-111K compared to FIG. 105D), suggesting that epegRNAs are especially beneficial in cell lines that are less efficiently transfected or edited by the original PE systems.

Effect of Engineered pegRNAs on Off-Target Prime Editing

[1392] It was previously demonstrated that prime editing results in substantially less off-target editing than other CRISPR gene editing strategies^{14,24-27}. To determine if the addition of evopreQ₁ or mpknot changed the extent of off-target editing, HEK293T cells were treated with pegRNAs or epegRNAs targeting HEK3, EMX1, or FANCF that template either a transversion (T•A-to-A•T at HEK3 or G•C-to-T•A at EMX1 and FANCF) or a 15-bp deletion using PE3. The extent of indel generation was measured, as well as any nucleotide changes that could reasonably arise from prime editing at the top four experimentally confirmed off-target sites²⁸, for each targeted locus, and the extent of off-target editing between epegRNAs and unmodified pegRNAs was compared following treatment with PE3. In all cases epegRNAs and pegRNAs both exhibited ≤0.1% off-target prime editing and or indels at the examined sites (FIG. 113), suggesting that epegRNAs and pegRNAs exhibit similar levels of off-target editing.

Basis of Enhanced Prime Editing with Engineered pegRNAs

[1393] EpegRNAs may enhance prime editing outcomes through a variety of mechanisms, including resistance to degradation, higher expression levels, more efficient Cas9 binding, and/or target DNA engagement when complexed with Cas9. Each of these possibilities were probed.

[1394] To determine whether evopreQ₁ or mpknot impede degradation of the pegRNA 3′ extension, the stability of epegRNAs and pegRNAs were compared following in vitro incubation with HEK293T nuclear lysates containing endogenous exonucleases. It was found that pegRNAs were degraded to a greater extent from this treatment compared to epegRNAs (1.9-fold compared to evopreQ₁ and 1.8-fold compared to mpknot, p<0.005, FIG. 106A). Conversely, addition of Cas9, which binds the guide RNA scaffold and is likely to protect the core sgRNA from degradation, rescued pegRNA abundance compared to either epegRNA as determined by RT-qPCR quantification of the guide RNA scaffold (FIG. 106B).

[1395] The ability of 3′ structural motifs to increase the abundance of the upstream scaffold region (FIG. 106B) suggests that pegRNA degradation in the nucleus is dominated by 3′-directed degradation. This model is consistent with the characterized behavior of the nuclear exosome, the major source of RNA turnover in the nucleus²⁹. However, partially degraded pegRNAs would generate editing-incompetent RNPs previously shown to inhibit prime editing (FIG. 104C). To detect partially degraded RNAs in cells, lysates of HEK293T cells transfected with plasmids encoding PE2 and either pegRNAs or epegRNAs templating either a +1 FLAG tag insertion at HEK3 or a nucleotide transversion at EMX1 were analyzed via northern blot. RNA species were observed containing the sgRNA scaffold and equivalent in size to the sgRNA, consistent with previous finding (FIG. 106B) that Cas9 binding protects the scaffold from 3′-directed degradation (FIGS. 114A-114C). However, lysates with different total levels of pegRNA or epegRNA had similar levels of sgRNA-like truncated species, which represented only a minority of the guide RNA content of the lysate (FIGS. 114A-114C). Since robust degradation of pegRNAs exposed to nuclear lysate was observed in vitro (FIGS. 106A-106B), and pegRNA is present in levels greater than PE2 in HEK293T cells (FIG. 104B), partially degraded pegRNA species likely do not accumulate at levels amenable to northern blot detection.

[1396] Next, genomic prime editing intermediates were examined to better understand how epegRNAs might be mediating improved editing efficiency. In the current model, the 3′ flap intermediate generated by RT extension of the nicked targeted site is converted into a 5′ flap intermediate, replacing the original genomic sequence with the newly synthesized one¹⁴. This 5′ flap is then removed by 5′-3′ exonucleases and the resulting genomic nick undergoes ligation to install the prime edit¹⁴. While full-length pegRNAs would be expected to efficiently template RT extension of the nicked genomic strand, truncated pegRNAs without a PBS should be unable to do so, resulting instead in nicking of the targeted strand followed by chew-back or extension of the strand by DNA repair enzymes (lacking the templated edit in either case). If a greater fraction of RT-extended prime editing intermediates is observed with epegRNAs than with pegRNAs, this would suggest that addition of 3′ RNA motifs improve the integrity of the PBS.

[1397] To capture these intermediates, HEK293T cells were transfected with plasmids encoding PE2 and either unmodified pegRNAs or epegRNAs containing evopreQ1 or mpknot that template transversions at HEK3, DNMT1, EMX1, or RNF2. Next, terminal transferase was used to label with oligo-dG the 3′ termini of genomic DNA, which should include intermediates of prime editing that have not yet undergone ligation. In each case, epegRNAs reduced the extent of editing-incompetent intermediates at the targeted site by an average of 2.2-fold across the four sites (FIGS. 106C and 115A-115C). The dominant reverse transcription product contained the full sequence templated by the 3′ extension and two nucleotides templated by the last two nucleotides of the pegRNA scaffold, consistent with previous in vitro characterization of PE intermediates¹⁴. The scaffold-templated nucleotides are presumably removed during DNA repair of the targeted locus to produce the cleanly edited alleles that represent the dominant product of PE. These data are consistent with a model in which epegRNAs improve reverse transcription of the pegRNA extension into the target site by reducing the frequency of unproductive target-site nicking from prime editors bound to truncated pegRNAs.

[1398] Because single-stranded 3′ termini are a common feature of 3′ exonuclease substrates³⁰, whether the degradation resistance conferred by these motifs could be explained by the more mechanically stable tertiary structures of pseudoknots was tested next. Notably, appending 15-bp (34-nt) hairpins to the 3′ terminus resulted in inconsistent improvements to PE efficiency compared to appending pseudoknots (FIGS. 116A-116D), suggesting that tertiary structure is indeed an important feature of epegRNAs.

[1399] To test if tertiary pseudoknot structure is required for epegRNA-mediated improvements in PE efficiency, editing efficiency of epegRNAs containing the G15C point mutation within evopreQ₁, a mutation known to disrupt pseudoknot formation, was examined (M1 in FIG. 108)²³. epegRNAs were used to install either a 24-bp FLAG epitope tag insertion, a 15-bp deletion, or transversions at HEK3 or RNF2 in HEK293T cells using PE3. Indeed, incorporation of the G15C mutation into evopreQ₁ abolished the increases in editing efficiency (FIG. 106D). These results establish that the secondary or tertiary structure of the motifs are critical for epegRNA-mediated PE improvements, likely by stabilizing the 3′ extension.

[1400] Next, the structured 3′ motifs in epegRNAs was tested to determine whether they might increase their expression level compared to pegRNAs. RT-qPCR quantification of the pegRNA scaffold revealed target-dependent differences in epegRNA expression levels relative to unmodified pegRNAs (FIGS. 114A-114C). For a pegRNA that templates a +1 FLAG tag insertion at HEK3, it was observed that addition of evopreQ1 or mpknot decreased pegRNA expression 9.2- to 9.6-fold, despite yielding a 1.9-fold improvement in the efficiency of FLAG tag epitope insertion at HEK3 (FIG. 105A). Similarly, epegRNAs that template a transversion at DNMT1 also exhibited reduced expression (1.6- to 2.1-fold). However, epegRNAs that template transversions at RNF2 or EMX1 were expressed to greater levels than those of unmodified pegRNA (2.2- to 2.4-fold and 1.4- to 3.7-fold, respectively, FIGS. 114A-114C). These data suggest that the 3′ motifs affect pegRNA expression inconsistently, concordant with the earlier finding (FIG. 104B) that PE efficiency under these transfection conditions is not limited by pegRNA expression in HEK293T cells. When epegRNA expression is more limiting, however, improving epegRNA expression might further improve editing efficiency.

[1401] Next, it was tested if the addition of a 3′ RNA structural motif reduced engagement of the target DNA site by comparing the ability of epegRNAs and pegRNAs to support transcriptional activation by dCas9-VP64-p65-Rta (dCas9-VPR) fusions was tested^{32,33} HEK293T cells were transfected with plasmids encoding dCas9-VPR, GFP downstream of either the HEK3, DNMT1, RNF2, or EMX1 target protospacer, and either pegRNAs, epegRNAs, or sgRNAs targeting the corresponding site. Transcriptional activation was measured via cellular GFP fluorescence after three days. In contrast to their ability to enhance PE activity (FIG. 105A), epegRNAs showed similar Cas9-dependent transcriptional activation in HEK293T cells as pegRNAs (FIG. 106F). Both epegRNAs and canonical pegRNAs resulted in lower transcriptional activation compared to an sgRNA targeting the same site (3.0-fold for pegRNA, 2.3-fold for evopreQ1 epegRNA, and 1.9-fold for mpknot epegRNA across four sites), suggesting that the 3′ extension in pegRNAs and epegRNAs modestly impedes target site engagement.

[1402] To deconvolute potential changes in target site engagement and differences in pegRNA and epegRNA expression, microscale thermophoresis (MST) was performed to measure the affinity of pre-incubated RNP complexes of catalytically inert Cas9 (dCas9) and pegRNAs or epegRNAs for a dsDNA substrate. It was found that addition of mpknot or evopreQ1 resulted in comparable or modestly reduced binding affinity for dsDNA compared to unmodified pegRNA respectively (K_{D}=10 nM for evopreQ1 epegRNA and 21 nM for mpknot pegRNA versus 8.1 nM for unmodified pegRNA, FIG. 106E). Affinity of pegRNAs for Cas9 H840A nickase was also modestly reduced by either motif (K_{D}=18 nM for evopreQ1 epegRNA, 11 nM for mpknot pegRNA, and 5 nM for unmodified pegRNA; FIG. 106G). These findings suggest that increased PE efficiency from epegRNAs does not arise from improved binding of the pegRNA to Cas9, or of the PE RNP complex to the targeted site.

[1403] Taken together, these results suggest that epegRNAs are more resistant to cellular degradation than pegRNAs and thus generate fewer truncated pegRNA species that erode prime editing efficiency. Additional mechanisms behind improvements from epegRNAs cannot be excluded.

Optimization of Engineered pegRNA 3′ Motifs

[1404] Having established that epegRNAs improve editing efficiency by resisting exonucleolytic degradation, it was hypothesized that more stable RNA motifs canmight further improve PE activity. Twenty-five additional structured RNA motifs were screened for their ability to improve epegRNA editing efficiency across epegRNAs encoding either the installation of a 24-bp FLAG epitope tag insertion, a 15-bp deletion, or a transversion at HEK3 or RNF2, were examined (FIGS. 116A-116D, FIGS. 117A-117C). These motifs included additional evolved prequeosine₁-1 riboswitch aptamers²¹, mpknot variants with improved pseudoknot stability²², G-quadruplexes of increasing stability³⁴, 15-bp hairpins, an xrRNA³⁵, and the P4-P6 domain of the group I intron³⁶. While 123 of the 137 epegRNAs tested exhibited improved overall prime editing compared to the corresponding pegRNAs, none demonstrated consistent improvements over evopreQ₁ or mpknot across the majority of edits tested (FIGS. 116A-116D, FIGS. 117A-117C).

[1405] Next, trimming unnecessary sequence from the added evopreQ₁ and mpknot motifs can further improve the epegRNA design because removing extraneous sequences within a structured RNA can reduce the propensity for misfolding³⁷. It was found that trimming 5 nt of excess sequence from evopreQ1 or mpknot resulted in marginal gains in average PE3-editing efficiency relative to the full-length epegRNAs (FIGS. 117A-117C). Since trimming these RNA motifs did not adversely affect editing efficiency and shorter epegRNAs are more readily prepared by chemical synthesis, trimmed evopreQ₁ (tevopreQ₁) was used in epegRNAs when applying epegRNAs to install therapeutically relevant mutations (see below).

[1406] It was also examined whether the “flip and extension” (F+E) sgRNA scaffold³⁸ would further improve epegRNA editing efficiency. This guide RNA scaffold mutates the fourth base pair of the direct repeat from U•A to A•U to remove a potential pol III terminator and extends the direct repeat by five base pairs to improve Cas9 binding³⁸. HEK293T cells were transduced with lentiviruses encoding either an unmodified (F+E) pegRNA, an (F+E) epegRNA containing tevopreQ1, or a tevopreQ1 epegRNA with the standard scaffold that templates a transversion at HEK3 or DNMT1, or a 3-nt insertion at HEK3. Use of tevopreQ1 substantially improved editing efficiency (3.8-fold for the nucleotide transversion and 2.6-fold for the 3-nt insertion at HEK3 and 6.8-fold at DNMT1) (FIG. 118). Use of the (F+E) scaffold in a tevopreQ1 epegRNA further improved editing efficiency (1.1-fold for the nucleotide transversion, 1.5-fold for the 3-nt insertion at HEK3, and 2.5-fold at DNMT1). sgRNA scaffold variants previously shown to increase Cas9-nuclease activity³⁹ under transfection conditions with reduced amounts of plasmid were also characterized, and similar overall benefits were observed, albeit with greater variability (FIG. 119). These findings further suggest that epegRNAs mediate greater improvements in PE efficiency when expression is limited. Additionally, these data highlight the potential for modified scaffolds to improve PE efficiency in conjunction with epegRNAs.

A Computational Tool to Design epegRNA Linkers

[1407] In contrast with protein linkers, RNA linkers more likely to be sequence-dependent, such that the same linker might function for one epegRNA but impede another. To minimize the possibility of interference from the epegRNA linker, pegLIT (pegRNA Linker Identification Tool) was developed (FIGS. 120A-120F), a computational tool that identifies linker sequences predicted to minimally base pair with the remainder of the epegRNA. For an initial validation, two sets of 15 evopreQ1 epegRNAs were tested with different linkers templating either a C•G-to-A•T transversion at RNF2 or a 15-bp deletion at DNMT1. Within each set, five linkers were recommended by pegLIT; five were predicted to base pair with the spacer, and five were predicted to base pair with the PBS. The use of pegLIT-designed linkers resulted in a modest increase in PE3 editing efficiency over the use of manually designed linkers (1.2-fold higher for RNF2 and 1.1-fold higher for DNMT1) (FIGS. 120A-120F). While spacer interactions did not significantly impact editing efficiency, linker-PBS interactions correlated with reduced PE3-editing efficiency, resulting in 1.3- and 1.1-fold lower editing efficiency compared to pegLIT linkers for RNF2 and DNMT1 respectively. The two worst-performing linkers, which resulted in 1.9- and 3.4-fold less efficient PE3 editing at RNF2 relative to optimal linker sequences, were correctly identified by pegLIT as scoring poorly for PBS interactions (FIGS. 120A-120F). The closer proximity of the linker to the PBS compared to the spacer may give linker:PBS interactions an entropic advantage compared to linker:spacer pairing.

[1408] PegLIT-designed linker sequences were studied to determine whether they could improve the efficacy of two epegRNAs (templating a G•C-to-T•A transversion at EMX1 and a 15-bp deletion at VEGFA) which initially failed to exhibit improved editing (FIGS. 111A-111K). Indeed, using pegLIT-designed linkers increased PE3 editing efficiency by 1.3-fold and 1.4-fold, respectively, over that of pegRNAs for these two edits (FIGS. 120A-120G). Collectively, these findings demonstrate that pegLIT facilitates the use of epegRNAs to consistently improve prime editing outcomes.

[1409] PegLIT-designed linkers were also studied to determine whether they improved the activity of epegRNAs compared to epegRNAs without linkers. Compared to mpknot epegRNAs without a linker, adding a pegLIT-designed linker resulted in a slightly increased editing efficiency than when using manually designed linkers (FIGS. 110 and 120A-120F). In contrast, the use of pegLIT linkers with evopreQ1 or tevopreQ1 epegRNAs did not significantly increase editing relative to epegRNAs without a linker (FIGS. 120A-120G).

Improved Editing Efficiency with Chemically Modified epegRNAs

[1410] Chemically synthesized gRNAs are commonly used when transfecting cells with mRNA or RNPs⁴⁰. Although synthetic gRNAs can incorporate chemical modifications that promote resistance to exonucleolytic-degradation^{16,40}, it was considered speculated that structural motifs might still mediate additional improvements in conjunction with such modification.

[1411] To demonstrate this possibility, prime editing efficiencies of synthetic tevopreQ₁ epegRNAs were compared with those of synthetic pegRNAs that install either a point mutation or 15-bp deletion at five genomic sites (HEK3, RNF2, DNMT1, RUNX1, and EMX1) in HEK293T cells. Both the epegRNAs and pegRNAs contained 2′-O-methyl modifications and phosphorothioate linkages between the first and last three nucleotides of the RNA. For six of the seven pegRNAs tested, the corresponding epegRNAs exhibited 1.1- to 3.1-fold higher editing with unchanged edit:indel ratios (FIGS. 121A-121B). These data suggest that epegRNAs also enhance PE outcomes compared to pegRNAs in applications that use chemically synthesized and modified pegRNAs.

Engineered pegRNAs Improve Prime Editing of Therapeutically Relevant Mutations

[1412] Having validated the use of epegRNAs as a strategy for broadly improving PE activity, we next compared the activity of epegRNAs containing tevopreQ₁ with that of pegRNAs to install a variety of protective or therapeutic genetic mutations. epegRNAs were successfully used to install the PRNP G127V allele that protects against human prion disease^{41,42} in HEK293T cells with 1.4-fold higher efficiency over the canonical pegRNA (FIG. 107A). In addition, epegRNAs were used to correct the most common cause of Tay-Sachs disease (HEXA^{1278+TATC}), both in previously constructed HEXA^{1278+TATC} HEK293T cell lines¹⁴ via plasmid lipofection and in primary patient-derived fibroblasts via nucleofection of in vitro transcribed mRNA and synthetic pegRNA (FIGS. 107B-107C). In both cases, improved editing efficiencies were observed for tevopreQ1epegRNAs containing pegLIT-designed 8-nt linkers over canonical pegRNAs (2.8-fold higher in HEK293T cells and 2.3-fold higher in patient-derived fibroblasts).

Installation of Therapeutically Relevant Edits Using Unoptimized epegRNAs

[1413] The design and screening of many pegRNAs with different PBS and RT templates is an important first step in the successful use of prime editing¹⁴. Although general rules to guide PBS and RT template length and composition have been described^{14,43}, identifying optimal pegRNAs often requires extensive screening of pegRNA constructs. It was considered that epegRNAs can support more efficient installation of therapeutically relevant prime edits even without extensive pegRNA optimization. The ability of unoptimized pegRNAs and epegRNAs to template the installation of nine protective or pathogenic point mutations using PE2. In all cases, the pegRNAs and epegRNAs used in this experiment contained a 13-nt PBS and an RT template containing 10 nt of homology to the targeted site after the last edited nucleotide, except when the 3′ extension would begin with cytosine¹⁴, in which case it was extended to the nearest non-C nucleotide.

[1414] pegRNAs that install therapeutically relevant mutations associated with Alzheimer's disease⁴⁴, coronary heart disease^{45,46}, type-2 diabetes⁴⁷, innate immunity⁴⁸, CDKL5 deficiency disorder⁴⁹, lamin A deficiency⁵⁰, and Rett syndrome^{51,52} were examined. These nine mutations include protective alleles in APP, PCSK9, SLC30A8, CD209, and CETP, as well as pathogenic mutations in CDKL5, LMNA, and MECP2⁵⁴. The outcomes of prime editing with pegRNAs and corresponding tevopreQ1 epegRNAs with 8-nt pegLIT linkers in HEK293T cells (FIG. 111D) were compared. Only a single pegRNA or epegRNA design was tested per target. In every case, epegRNAs outperformed pegRNAs in editing efficiency. For five of the nine therapeutically relevant edits tested, epegRNAs resulted in ≥20% editing efficiency, which is typically sufficient to generate model cell lines. By comparison, only three of the nine pegRNAs achieved this level of editing efficiency. The higher editing efficiencies mediated by epegRNAs (2.8-fold higher than pegRNAs on average) should streamline the production of homozygous cell lines, an important consideration for modeling recessive mutations. Similarly, unoptimized epegRNAs mediated insertion of a 24-bp FLAG tag with ≥10% efficiency at 5 of 15 tested sites; the corresponding pegRNAs did not achieve ≥10% efficiency at any site tested (FIGS. 122A-122B). Taken together, these findings demonstrate that epegRNAs streamline the production of model cell lines with PE.

### Discussion

[1415] Presented herein are the design, characterization, and validation of engineered pegRNAs to address a key bottleneck in prime editing. These epegRNAs contain a structured RNA motif 3′ of the PBS that prevents degradation of the pegRNA extension and the subsequent formation of editing-incompetent PE complexes that compete for access to the targeted genomic site. It was found that epegRNAs broadly improve prime editing efficiency in all five cell lines and primary cell types tested, with larger improvements observed in cell lines that are more difficult to transfect. Additionally, it was observed that the use of epegRNAs can enhance prime editing performance when using chemically modified pegRNAs, when installing therapeutically relevant edits in human cells, and when using unoptimized pegRNA designs. Finally, a computational program that expedites epegRNA design by identifying linkers that minimize the risk of counterproductive secondary structure was described. In total, these findings establish that epegRNAs broadly improve prime editing outcomes at a wide variety of genomic loci, edit types (substitutions, insertions, and deletions), and cell types.

[1416] Improvements in prime editing enabled by epegRNAs are likely to depend on delivery strategy. Lower-expression delivery modalities such as some viral vectors might benefit more strongly from the use of epegRNAs when pegRNA concentration is limiting (FIG. 119). Similarly, further improvements in the synthesis of chemically modified RNAs might decrease the benefits of epegRNAs by mitigating pegRNA 3′ degradation. Additionally, the longer length of epegRNAs (an additional 37 nt when using tevopreQ₁) is an important consideration when using synthetic epegRNAs given current challenges of chemically synthesizing longer RNAs.

[1417] The use of epegRNAs is recommended for prime editing experiments that can support a modestly longer pegRNA. Extensive screening may not be needed when maximizing editing efficiency is not the priority. In these cases, an epegRNA containing the trimmed evopreQ₁ motif and an 8-nt pegLIT-designed linker with a PBS length of 13 and a template that includes either 10 nt of homology past the targeted edit for small insertions, deletions, and point mutations-or 25 nt of homology for larger insertions or deletions-provides a promising starting point for epegRNA designs. PBS, RT template length, and nicking sgRNA can then be optimized if observed editing efficiencies are insufficient.

pegLIT Strategy for Identifying Optimal Linker Sequences

[1418] pegLIT uses simulated annealing to sample the analyzed linker space efficiently¹. Linkers that are adenosine- or cytosine-rich are preferred by pegLIT since these nucleotides have been reported to function better as flexible RNA linkers². Additionally, pegLIT filters out linkers that contain runs of four or more uridines, since such sequences could cause premature transcriptional termination³.

[1419] The pegLIT tool then analyzes linkers that pass these requirements using ViennaRNA⁴ to predict potential interactions between the linker sequence and the pegRNA spacer, PBS, template, or scaffold. The base pair probabilities of these predicted interactions are used to generate subscores for each region of the pegRNA, each of which represents the degree to which the linker is predicted to avoid interaction with the associated region. For example, a subscore of 0.95 for the PBS essentially indicates that, on average, the predicted probability of a pegRNA folded state lacking base pairing between any linker nucleotide and the PBS is 95%.

[1420] The use of pegLIT was validated for linker design and which interactions identified by pegLIT were most detrimental to editing efficiency was examined. 30 linker sequences were generated (10 recommended by pegLIT, 10 interacting with the spacer, and 10 interacting with the PBS) to test with evopreQ₁ epegRNAs templating either a C•G-to-A•T transversion at RNF2 or a 15-bp deletion at DNMT1. The average spacer and PBS subscores were 0.94 and 0.97 for the optimal sequences, 0.66 and 0.95 for the spacer sequences, and 0.86 and 0.21 for the PBS sequences. Relative to the recommended designs, use of the PBS-interacting linkers was associated with 1.3- and 1.1-fold lower editing efficiency at RNF2 and DNMT1 respectively (FIGS. 120A-120G), whereas the spacer-interacting linkers had a negligible effect on editing efficiency. This difference may be because the closer proximity of the linker to the PBS compared to the spacer may give linker:PBS interactions an entropic advantage compared to linker:spacer pairing.

epegRNAs Delivered Via Plasmid Transfection with Optimized Guide RNA Scaffolds in HEK293T Cells

[1421] To mimic lower expression conditions, HEK293T cells were transfected with 20 ng of PE2 plasmid and 4 ng of pegRNA or epegRNA plasmid when assessing the applicability of “flip and extension” (F+E) sgRNA scaffold variants for PE. The editing efficiency of epegRNAs targeted to PRNP, HEK3, RUNX1, and EMX1 that contained the canonical sgRNA scaffold, an (F+E) scaffold⁵, or one of six (F+E) scaffolds bearing mutations previously shown to increase Cas9-nuclease activity⁶ were compared. It was found that these alternative scaffolds overall either maintained or improved PE efficiency relative to the standard scaffold, with cr772 exhibiting the best improvement (FIG. 119). While efficiency improvements were less consistent under these conditions compared to lentiviral transduction (FIG. 118), this may stem from differences in expression. EpegRNA expression is likely several-fold higher following plasmid transfection than that following single-copy lentiviral transduction, which may partially obfuscate the benefits of more efficient transcription and Cas9 binding affinity. Testing cr772 or the original (F+E) scaffold to further improve PE efficiency with epegRNAs is recommended, especially for applications with lower expression than plasmid transfection.

Installation of FLAG Tags Using Unoptimized epegRNAs

[1422] epegRNAs and pegRNAs were compared for the installation of more challenging edits, such as insertion of the 24-bp FLAG epitope tag (FIG. 105A). The ability of unoptimized pegRNAs and tevopreQ₁ epegRNAs containing one of two loci-specific pegLIT-designed 8-nt linkers to template the installation of a FLAG epitope tag at 15 loci in HEK293T cells using PE2 was assessed (FIGS. 122A-122B). The unoptimized epegRNAs and pegRNAs were designed with a 13-nt PBS and an RT template containing 25 nt of homology downstream of the inserted FLAG epitope tag, except when the 3′ extension would begin with cytosine7, in which case it was extended to the nearest non-C nucleotide. The use of epegRNAs enabled FLAG tags to be installed with PE2 at ≥10% efficiency with no PBS and RT template optimization at 5 of the 15 sites, while ≥10% efficiency was not observed with any pegRNAs (FIGS. 122A-122B). These observations further demonstrate that epegRNAs can enhance prime editing performance for a variety of edits at many different endogenous human genomic loci.

### Methods

[1423] General Methods. Plasmids expressing pegRNAs and epegRNAs were cloned either by Gibson assembly, Golden Gate assembly using either a previously described custom acceptor plasmid¹⁴ or newly designed custom acceptor plasmids that contain trimmed evopreQ₁ or mpknot (the use of which is described below), or they were synthesized and cloned by Twist Biosciences. Plasmids expressing sgRNAs were cloned via Gibson or USER assembly. DNA amplification was accomplished by PCR with Phusion U or High Fidelity Phusion Green Hot Start II (New England Biolabs). Plasmids expressing pegRNAs were purified using PureYield plasmid miniprep kits (Promega) when transfecting HEK293T cells or Plasmid Plus Midiprep kits (Qiagen) when transfecting other cell types, while plasmids expressing prime editors were purified exclusively using Plasmid Plus Midiprep kits. Plasmids ordered from Twist Biosciences were resuspended in nuclease-free water and used directly. Primers and dsDNA fragments were ordered from Integrated DNA Technologies (IDT).

[1424] Guidelines for epegRNA cloning via Golden Gate DNA assembly⁶¹. When cloning epegRNAs using the Golden Gate method, the same protocol as previously described¹⁴ is appropriate with the important note that the junction sequence between the 3′ extension oligo and the plasmid backbone is different for epegRNAs using tevopreQ₁ and trimmed mpknot (tmpknot), as shown below. More details on pegRNA design and cloning are available at liugroup.us. Plasmid backbones used for Golden Gate cloning have been deposited with Addgene. SEQ ID NOs: 486-489 (top-bottom):

| | |
|---|---|
| Forward oligo for | 5′-GTGCNNNNNNNNNNNN |
| 3′ extension of | NNNNNNNNNNNN -3' |
| pegRNAs and | |
| epegRNAs | |
| Reverse oligo for | 3′- NNNNNNNNNNNN |
| 3′ extension | NNNNNNNNNNNNAAAA-5′ |
| of pegRNAs | |
| Reverse oligo for | 3′- NNNNNNNNNNNN |
| 3′ extension of | NNNNNNNNNNNNGCGC-5′ |
| epegRNAs with | |
| tevopreq, −1 | |
| Reverse oligo for | 3′- NNNNNNNNNNNN |
| 3′ extension | NNNNNNNNNNNNGGGAGTC-5′ |
| of epegRNAs | |
| with tmpknot | |

[1425] Synthetic pegRNAs and in vitro transcribed mRNA generation. Synthetic pegRNAs were ordered from IDT and contained 2′-O-methyl modifications at the first and last three nucleotides and phosphorothioate linkages between the three first and last nucleotides and were used directly. Synthetic nicking sgRNAs were ordered from Synthego and contained 2′-O-methyl modifications at the three first and last nucleotides and phosphorothioate linkages between the first three and last two nucleotides. PE-encoded mRNA was transcribed in vitro using the protocol in Gaudelli et al. (2020). Briefly, the PE2 cassette—consisting of a 5′ UTR, Kozak sequence, PE2 ORF and 3′ UTR—was cloned into a plasmid containing an inactive T7 (dT7) promoter. The mRNA transcription template was generated via PCR using a primer to install the correct T7 promoter sequence and a reverse primer which installed the poly-A tail. mRNA was generated using a HiScribe T7 High-Yield RNA Kit (New England Biolabs) according to the manufacturer's instructions, with the exception that N1-methylpseudouridine triphosphate (Trilink) was substituted for uridine triphosphate and CleanCapAG (Trilink) was added to enable co-transcriptional capping. The resulting mRNA was purified via lithium chloride precipitation and reconstituted in TE buffer (10 mM Tris, 1 mM EDTA, pH 8.0 at 25° C.). Sequences of pegRNAs and sgRNAs used in this example can be found in Table E1. A list of structured RNA motifs examined in this example can be found in Table E2.

[1426] General mammalian cell culture conditions. HEK293T (ATCC CRL-3216), U20S (ATCC HTB-96), K562 (CCL-243), and HeLa (CCL-2) cells were purchased from ATCC and cultured and passaged in Dulbecco's Modified Eagle's Medium (DMEM) supplemented with GlutaMax (Thermo Fisher Scientific), McCoy's 5A Medium (Gibco), RPMI Medium 1640 plus GlutaMAX (Gibco), or Eagle's Minimal Essential Medium (EMEM, ATCC), respectively, each supplemented with 10% (v/v) fetal bovine serum (Gibco, qualified). Primary Tay Sachs disease patient fibroblast cells were obtained from the Coriell Institute (Cat. ID GM00221) and grown in low-glucose DMEM (Sigma Aldrich) and 10% (v/v) FBS, supplemented with an additional 2 mM L-glutamine (Thermo Fisher Scientific). All cell types were incubated, maintained, and cultured at 37° C. with 5% CO2. Each cell line was authenticated by its respective supplier and tested negative for mycoplasma.

[1427] Tissue culture transfection and nucleofection protocols and genomic DNA preparation. For transfections, 10,000 HEK293T cells were seeded per well on 96-well plates (Corning). 16-24 hours post-seeding, cells were transfected at approximately 60% confluency with 0.5 μL of Lipofectamine 2000 (Thermo Fisher Scientific) according to the manufacturer's protocols and 200 ng of PE plasmid, 40 ng of pegRNA plasmid, and 13 ng of sgRNA plasmid (for PE3).

[1428] For nucleofections, HEK293T cells were electroporated with in vitro transcribed mRNA and synthetic pegRNA using a Lonza 4D Nucleofector with an SF cell line kit (Lonza). 200,000 cells per electroporation were centrifuged for 8 min at 120×g, then washed in 1 mL PBS (Thermo Fisher Scientific). After a second centrifugation, cells were resuspended in 5 μL reconstituted SF buffer per sample and added to microcuvettes.

[1429] For each cuvette, 17 μL of cargo mix (1 ug of PE2 mRNA in 0.5 μL, 90 pmol of pegRNA in 0.9 μL, and 60 pmol of nicking sgRNA in 0.6 μL, and 15 μL of reconstituted SF buffer) was added and pipetted up and down three times to mix. Cells were electroporated using program CM-130, then 80 μL of warm media was added and cells were incubated for 10 min at room temperature. The mixture was then pipetted to mix and 25 μL was added to the well of a 48-well plate, with a final culture volume of 250 μL per well. For experiments in HeLa, U20S, and K562 cells, 800 ng PE2-expressing plasmid, 200 ng pegRNA-expressing plasmid, and 83 ng nicking sgRNA-expressing plasmid were nucleofected in a final volume of 20 μL in a 16-well nucleovette strip (Lonza). HeLa cells were nucleofected using the SE Cell Line 4D-Nucleofector X Kit (Lonza) with 2×10⁵ cells per sample (program CN-114), according to the manufacturer's protocol. U20S cells were nucleofected using the SE Cell Line 4D-Nucleofector X Kit (Lonza) with 2×10⁵ cells per sample (program DN-100), according to the manufacturer's protocol. K562 cells were nucleofected using the SE Cell Line 4D-Nucleofector X Kit (Lonza) with 2×10⁵ cells per sample (program FF-120), according to the manufacturer's protocol.

[1430] Patient-derived fibroblasts were electroporated with mRNA-encoding PE2 and synthetic pegRNA and nicking sgRNA as described above for HEK293T cells using an SE cell line kit and 100,000 cells which were centrifuged at 100×g for 10 min. Additionally, 40 μL of recovered cells were added to a 48 well plate instead of 25. In all cases, cells were cultured 3 days following transfection, after which the media was removed, and cells were washed with PBS and subsequently lysed by the addition of 50 μL for 96-well plates or 150 μL for 48-well plates of freshly prepared lysis buffer (10 mM Tris-HCl, pH 8 at 25° C.; 0.05% SDS; 25 μg mL⁻¹ Proteinase K (Qiagen)), and incubating at 37° C. for 1 hour or more, after which Proteinase K was inactivated over 30 minutes at 80° C. The resulting gDNA was stored at −20° C. until used.

[1431] High-throughput DNA sequencing of genomic DNA samples. Genomic sites of interest were amplified from genomic DNA samples and sequenced on an Illumina MiSeq as previously described¹⁴. Cas9 off-target sites for HEK3, EMX1, and FANCF were previously identified via Guide-Seq²⁹. Primers used for mammalian cell genomic DNA amplification are listed in Table E3 and amplicons are listed in Table E4. Sequencing reads were demultiplexed using MiSeq Reporter (Illumina). Alignment of amplicon sequences to a reference sequence was performed using CRISPResso2⁵⁹. For all prime editing yield quantifications, editing efficiency was calculated as the percentage of reads with the desired editing without indels out of the total number of reads with an average phred score of at least thirty. For quantification of point mutation editing, CRISPResso2 was run in standard mode with “discard_indel_reads” on. Editing yield was calculated as the percentage of non-discarded reads containing the edit divided by total reads. For insertion or deletion edits, CRISPResso2 was run in HDR mode using the desired allele as the expected allele, and with “discard_indel_reads” on. Editing yield was calculated as the percentage of HDR aligned reads divided by total reads. For all experiments, indel frequency was calculated as the number of discarded reads divided by the total number of reads. For experiments involving PE2, reads were analyzed for indels within 10 nucleotides up- and downstream of the pegRNA nick site, inclusive. For experiments involving PE3, reads were analyzed for indels between 10 nucleotides upstream of the pegRNA nick site and downstream from the sgRNA nick site, inclusive. Off-target editing was quantified as described previously¹⁴.

[1432] In vitro exonuclease susceptibility assays, pegRNAs or epegRNAs containing either mpknot or evopreQ₁ were prepared using the HiScribe T7 Quick High Yield RNA synthesis kit (New England Biolabs) from PCR-amplified templates containing a T7 promoter sequence per the manufacturer's protocols. Nuclear extracts were prepared from 3 million HEK293T cells grown to 70-80% confluency per the manufacturer's protocols using the EpiQuik Nuclear Extraction kit (EpiGentek). Assays were carried out in 10 μL reactions containing 20 mM Tris-HCl (pH 7.5), 5 mM MgCl2, 50 mM NaCl, 2 mM DTT, 1 mM NTP and 0.8 U/l RNaseOUT Recombinant Ribonuclease Inhibitor (40 U/L; ThermoFisher Scientific) to inhibit endonuclease activity. 3 μL of fresh nuclear lysate was used to degrade 0.5 μg of RNA substrate per reaction. Followed by the incubation of reaction mixtures at 37° C. for 20 min, degradation products were resolved on 2.0% agarose gels stained with SYBR Gold. The extent of degradation was determined using ImageJ software (NIH).

[1433] RTqPCR of total RNA. 10,000 HEK293T cells per well were seeded in 96-well plates. 16-24 hours post-seeding, cells were transfected at approximately 60% confluency with 0.5 μL of Lipofectamine 2000 according to the manufacturer's protocols and 200 ng of PE2 plasmid and 40 ng of either pegRNA or epegRNA plasmid. After three days, the Power SYBR Green Cells-to-C_{T} kit (Thermo Fisher Scientific) was used to extract total RNA, to reverse transcribe total cDNA with random hexamers, and to perform qPCR with forward and reverse primers that amplify the sgRNA scaffold, according to the manufacturer's protocols. Primer sequences are available in Table E5.

[1434] Cas9-based transcriptional activation. 10,000 HEK293T cells per well were seeded in 96-well black-wall plates (Corning). 16-24 hours post-seeding, cells were transfected at approximately 60% confluency with 0.5 μL of Lipofectamine 2000 according to the manufacturer's protocols and 100 ng of dCas9-VPR plasmid, 30 ng of GFP reporter plasmid, 15 ng of iRFP plasmid, and 20 ng of sgRNA, pegRNA, or epegRNA plasmid. After three days, cells were measured for GFP and iRFP fluorescence using an Infinite M1000 Pro microplate reader (Tecan). GFP fluorescence was normalized to iRFP fluorescence after subtracting background fluorescence signal from untreated cells.

[1435] Linker design via pegLIT. To design epegRNA linker sequences, a custom algorithm, pegRNA Linker Identification Tool, or pegLIT, was written that searches for linker sequences of a specified length that minimize base pairing with the remainder of the pegRNA. This procedure uses simulated annealing to maximize subscores, each of which corresponds to a subsequence of the pegRNA: spacer, PBS, template, or scaffold. During optimization, the higher-scoring linker in any pair of linkers was determined by comparing their discretized subscores in order of the following subsequence priority: spacer, PBS, template, and then scaffold. Each subscore is calculated, using base pair probabilities calculated by ViennaRNA 2.0²⁵ under standard parameters (37° C., 1 M NaCl, 0.05 M MgCl2), as the complement of the mean probability that a nucleotide in the linker forms a base pair with any nucleotide in the pegRNA subsequence under consideration, where the mean is taken over all bases in the linker. Linker sequences with AC content <50% and those that would result in a pegRNA containing four of the same nucleotide consecutively are removed from consideration^{39,40}. Optionally, the algorithm performs hierarchical agglomerative clustering on the 100 highest-scoring linkers and outputs one linker per cluster in order to promote sequence diversity in the final output. The code for pegLITis shown below:

```
            from math import prod
            from random import choice, randint, random
            import heapq
            import numpy as np
            from tqdm import trange
            from scipy.special import expit as sigmoid
            from sklearn.cluster import AgglomerativeClustering as HAC
            from Levenshtein import distance as levenshtein_distance
            import RNA
            BASE_SYMBOLS = {
              “A”: (“A”,), “C”: (“C”,), “G”: (“G”,), “T”: (“T”,), “U”: (“T”,),
              “W”: (“A”, “T”), “S”: (“C”, “G”), “M”: (“A”, “C”),
              “K”: (“G”, “T”), “R”: (“A”, “G”), “Y”: (“C”, “T”),
              “B”: (“C”, “G”, “T”), “D”: (“A”, “G”, “T”), “H”: (“A”, “C”, “T”), “V”: (“A”, “C”,
            “G”),
              “N”: (“A”, “C”, “G”, “T”)}
            def apply_filters(seq_pre, seq_linker, seq_post, ac_thresh, u_thresh, n_thresh):
              ″″″
              Returns False if any filter is failed i.e. AC content < ac_thresh OR consecutive Us >
            u_thresh.
              OR consecutive Ns > n_thresh. Otherwise, True if all filters are passed. All
            thresholds have
              units nt (i.e. ac_thresh is not a percent). Ts are treated as Us.
              ″″″
              # AC content
              if seq_linker.count(“A”) + seq_linker.count(“C”) < ac_thresh:
                return False
              # Consecutive U
              seq_neighborhood = seq_pre[-(u_thresh):] + seq_linker + seq_post[:u_thresh]
              seq_neighborhood = seq_neighborhood.replace(“T”, “U”)
              if “U” * (u_thresh + 1) in seq_neighborhood:
                return False
              # Consecutive N
              seq_neighborhood = seq_pre[-(n_thresh):] + seq_linker + seq_post[:n_thresh]
              seq_neighborhood = seq_neighborhood.replace(“T”, “U”)
              if any(nt * (n_thresh + 1) in seq_neighborhood for nt in set(seq_linker)):
                return False
              return True
            def calc_subscores(linker_pos, *sequence_components):
              ″″″
              Calculate base-pairing probs marginalized for each nucleotide
              ″″″
              # Calculate bpp from ViennaRNA
              pegrna = RNA.fold_compound(“”.join(sequence_components))
              _ = pegrna.pf( ) # need to first internally calculate partition function
              basepair_probs = np.array(pegrna.bpp( ))[1:, 1:]
              # Fill in lower-triangle and diagonal of ViennaRNA's upper-triangular bpp matrix
              unpaired_probs = 1. - (basepair_probs.sum(axis=0) + basepair_probs.sum(axis=1))
              # copy data to make symmetric
              i_lower = np.tril_indices(len(basepair_probs), -1)
              i_diag = np.eye(len(basepair_probs), dtype=bool)
              basepair_probs[i_lower] = basepair_probs.T[i_lower]
              basepair_probs[i_diag] = unpaired_probs
              # Track indices of subsequences
              idx_cur = 0
              seq_idx = [ ]
              for subseq in sequence_components:
                idx_prev = idx_cur
                idx_cur += len(subseq)
                seq_idx.append(slice(idx_prev, idx_cur))
              # Extract subscores for subsequences
              bpp_subseq = np.ma.masked_all(len(sequence_components))
              for i, subseq in enumerate(sequence_components):
                bpp_within_subseq = basepair_probs[seq_idx[i], seq_idx[linker_pos]]
                bpp_subseq[i] = np.mean(np.sum(bpp_within_subseq, axis=0))
              return bpp_subseq
            def apply_score(seq_spacer, seq_scaffold, seq_template, seq_pbs, seq_linker,
                    score_to_beat=None, epsilon=0.01):
              ″″″
              Calculates subscores then outputs hashed score. Terminates calculation early if score
            will
              be less than score_to_beat. Prioritize PBS, spacer, template, scaffold.
              ″″″
              # Cas9 complex at R loop subscore
              bpp_subseq1 = calc_subscores(2, seq_template, seq_pbs, seq_linker)
              subscore_pbs = 1. - bpp_subseq1[1]
              subscore_template = 1. - bpp_subseq1[0]
              # Free pegRNA subscore
              if ((score_to_beat is not None)
                  and (epsilon * int(subscore_pbs / epsilon) < score_to_beat[0])):
                subscore_spacer = 0.
                subscore_scaffold = 0.
              else:
                bpp_subseq2 = calc_subscores(4, seq_spacer, seq_scaffold,
                              seq_template, seq_pbs, seq_linker)
                subscore_spacer = 1. - bpp_subseq2[0]
                subscore_scaffold = 1. - bpp_subseq2[1]
              # Turn subscores into a single score
              return tuple(
                epsilon * int(val / epsilon)
                if val is not None else 0
                for val in (subscore_pbs, subscore_spacer, subscore_template, subscore_scaffold)
                )
            def optimize(seq_spacer, seq_scaffold, seq_template, seq_pbs, seq_motif,
                  linker_pattern, ac_thresh, u_thresh, n_thresh, topn, epsilon,
                  num_repeats, num_steps, temp_init, temp_decay):
              ″″″
              Simulated annealing optimization of linkers
              ″″″
              ## Pre-process inputs
              seq_pre = seq_spacer + seq_scaffold + seq_template + seq_pbs
              seq_post = seq_motif
              ac_thresh = ac_thresh * len(linker_pattern)
              ## Simulated annealing to optimize linker sequence
              # Initialize hashmap of sequences already considered
              linker_skip = { }
              len_sequence_space = prod(len(BASE_SYMBOLS[nt]) for nt in linker_pattern)
              # Initialize min heap of topn linkers
              linker_heap = [ ]
              for _ in trange(num_repeats, desc=“Repeats”, position=0, leave=False):
                # Initialize simulated annealing
                seq_linker_prev = “”.join([choice(BASE_SYMBOLS[nt]) for nt in linker_pattern])
                score_prev = None
                temp = temp_init
                for _ in trange(num_steps, desc=“Steps”, position=1, leave=False):
                  # Generate new sequence by substituting characters in sequence until pass filters
                  seq_linker = seq_linker_prev
                  keep_going = True
                  while keep_going:
                    char_pos = randint(0, len(linker_pattern) - 1)
                    seq_linker = (
                      seq_linker[:char_pos]
                      + choice(BASE_SYMBOLS[linker_pattern[char_pos]])
                      + seq_linker[(char_pos + 1):])
                    keep_going = (
                      seq_linker in linker_skip
                      or not apply_filters(seq_pre, seq_linker, seq_post,
                                ac_thresh, u_thresh, n_thresh)
                      or len(linker_skip) >= len_sequence_space) # already screened whole seq space
                    linker_skip[seq_linker] = True
                  # Calculate score for linker sequence
                  score_to_beat = linker_heap[0][0] if len(linker_heap) >= topn else None
                  score = apply_score(seq_spacer, seq_scaffold, seq_template, seq_pbs, seq_linker,
                            score_to_beat=score_to_beat, epsilon=epsilon)
                  # Add to min heap i.e. maintains the top `topn` largest entries
                  if score_to_beat is None: # heap is not yet full
                    heapq.heappush(linker_heap, (score, seq_linker))
                  elif score > score_to_beat:
                    heapq.heapreplace(linker_heap, (score, seq_linker))
                  # Decide if keep proposal
                  if (score_prev is None  # initialize
                    or score > score_prev  # exploit improvement
                    or random( ) < sigmoid(  # explore
                      sum((s1 - s2) * (epsilon ** i)
                        for i, (s1, s2) in enumerate(zip(score, score_prev))) / temp
                      )):
                    seq_linker_prev = seq_linker
                    score_prev = score
                  # Update simulated annealing param
                  temp *= temp_decay
              linker_heap_scores, linker_heap = zip(*linker_heap)
              return linker_heap_scores, linker_heap
            def apply_bottleneck(heap_scores, heap, bottleneck):
              ″″″
              Cluster sequences and output top-scoring sequence per cluster.
              ″″″
              # Can just pick best output
              if bottleneck == 1:
                return heap[np.argmax(heap_scores)]
              # Calculate features for each linker sequence i.e. edit distance to all other linker
            sequences
              features = np.zeros((len(heap), len(heap)), dtype=int)
              for i, seq_x in enumerate(heap):
                for j, seq_y in enumerate(heap):
                  features[i, j] = levenshtein_distance(seq_x, seq_y)
              # Cluster linker sequences
              clusters = HAC(n_clusters=bottleneck, linkage=“complete”).fit_predict(features)
              # Output highest-scoring linker sequence from each cluster
              output = [ ]
              heap_scores = np.array(heap_scores)
              for cluster_num in range(bottleneck):
                cluster_scores = clusters == cluster_num
                for subscore_num in range(heap_scores.shape[1]):
                  subscore_maxed = (heap_scores[:, subscore_num]
                            == np.max(heap_scores[cluster_scores, subscore_num]))
                  cluster_scores = np.logical_and(cluster_scores, subscore_maxed)
                idx_maxed = np.where(cluster_scores)[0]
                output.append(heap[np.random.choice(idx_maxed)])
              return output
            def pegLIT(seq_spacer, seq_scaffold, seq_template, seq_pbs, seq_motif,
                  linker_pattern=“NNNNNNNN”, ac_thresh=0.5, u_thresh=3, n_thresh=3,
            topn=100,
                  epsilon=1e-2, num_repeats=10, num_steps=250, temp_init=0.15,
            temp_decay=0.95,
                  bottleneck=1):
              ″″″
              Optimizes+bottlenecks linker for an inputted pegRNA. Outputs linker
            recommendation(s).
              ″″″
              # Simulated annealing to optimize linker sequence
              linker_heap_scores, linker_heap = optimize(
                seq_spacer, seq_scaffold, seq_template, seq_pbs, seq_motif,
                linker_pattern=linker_pattern, ac_thresh=ac_thresh, u_thresh=u_thresh,
                n_thresh=n_thresh, topn=topn, epsilon=epsilon, num_repeats=num_repeats,
                num_steps=num_steps, temp_init=temp_init, temp_decay=temp_decay)
              # Sample diverse sequences
              linker_output = apply_bottleneck(linker_heap_scores, linker_heap,
            bottleneck=bottleneck)
              return linker_output
            # Example usage for HEK3 +1 FLAG ins
            print(pegLIT(
              seq_spacer=“GGCCCAGACTGAGCACGTGA”,
            seq_scaffold=“GTTTTAGAGCTAGAAATAGCAAGTTAAAATAAGGCTAGTCC
            GTTAT”
                    “CAACTTGAAAAAGTGGCACCGAGTCGGTGC”,
            seq_template=“TGGAGGAAGCAGGGCTTCCTTTCCTCTGCCATCACTTATCG”
                    “TCGTCATCCTTGTAATC”,
              seq_pbs=“CGTGCTCAGTCTG”,
              seq_motif=“CGCGGTTCTATCTAGTTACGCGTTAAACCAACTAGAA”))
Sequences shown are: seq_spacer (SEQ ID NO: 490); seq_scaffold (top) (SEQ ID NO: 491);
seq_scaffold (bottom) (SEQ ID NO: 492); seq_template (top) (SEQ ID NO: 493); seq_template
(bottom) (SEQ ID NO: 494); seq_pbs (SEQ ID NO: 495); seq_motif (SEQ ID NO: 219).
```

### Example 5: Additional Strategies for Improving Prime Editing

[1436] Additional strategies for improving prime editing were also developed. These include three broad areas in which prime editing can be improved, as shown in FIG. 131: 1) recognition of the target nucleic acid; 2) installation of the edit(s); and 3) resolution of the edited DNA heteroduplex. The following example focuses on increasing editing efficiency by improving recognition of the target nucleic acid, specifically through reducing interactions between the PBS and spacer sequences on the pegRNA. Relative to sgRNAs, pegRNAs and epegRNAs may sometimes have reduced target site engagement and reduced binding to Cas9. PBS:spacer interactions can limit prime editing efficiency by reducing Cas9 affinity (FIG. 132). Such interactions are also necessary, however, in order for PBS:protospacer binding to occur. As shown in FIG. 132, a shorter PBS can result in improved binding affinity to Cas9. Strategies for reducing PBS:spacer interactions were therefore explored, including 1) occlusion of the PBS with toeholds that dissociate upon Cas9 binding; 2) delivery of the pegRNA template in trans via the nicking sgRNA; and 3) introducing chemical and/or genetic modifications that differentially affect PBS:spacer and PBS:protospacer interactions.

[1437] First, the strategy of occluding the PBS with toeholds that dissociate upon Cas9 binding was explored. It was observed that toeholds can inhibit both PBS:spacer and PBS:protospacer interactions if independent of Cas9 binding (FIG. 133). The MS2 hairpin was fused to the 3′ end of the pegRNA, while the MS2 bacteriophage coat protein was fused to the reverse transcriptase of the prime editor. As shown in FIG. 134, the toehold can be competed off by PE2 binding due to competitive RNA-protein interactions. Several design considerations should be taken account when using this strategy, including 1) the interdependence of the lengths of both the Cas9-RT and the RT-MS2 linkers, the pegRNA extension and PBS linkers, the toehold linker, and the linker between the MS2 aptamer and toehold; 2) the toehold length dependence upon PBS melting temperature and site accessibility; 3) optimization for each site; and 4) tolerance for a non-interacting 17 nucleotide PBS. Both N-terminal and C-terminal fusions of MS2 to PE2 were tested. It was discovered that use of C-terminal MS2 fusions results in superior editing efficiency to N-terminal fusions at HEK3 (FIG. 135). It was observed that MS2 tagging of PE2 provides benefits in editing efficiency compared to untagged PE2 using various pegRNAs (FIG. 136). PE2-MS2 fusions comprising either an xten-16aa linker or an xten-33aa linker were both tested relative to PE2-xten without an MS2 fusion. It was also observed that MS2 and toeloop tagging rescues long primer binding sites (FIG. 137). Overall, the strategy of occluding the PBS with toeholds that dissociate upon Cas9 binding shows some benefits in editing efficiency at various genomic sites, and particularly ones that are normally edited at lower efficiency due to low PBS:protospacer stability. It was also shown that epegRNAs motifs can be bi-functional, improving pegRNA stability.

[1438] Next, the strategy of delivering the pegRNA template in trans via the nicking sgRNA was explored. It was found hypothesized that the pegRNA extension can could be moved onto the nicking guide to completely avoid PBS-spacer interactions (FIG. 138). Several design considerations should also be taken into account when using this strategy, including: 1) the impact of an extended template as a linker on flap resolution; 2) optimization of the nicking spacer; and 3) the need for both PE complexes to be present on the genome simultaneously. It was observed that this strategy enables prime editing at DMNT1, HEK3, PRNP, RUNX1, and VEGFA (FIG. 139).

[1439] FIG. 140 shows a model based on mismatch identity and position within the PBS relative to the nick.

[1440] FIG. 141 shows that mutations to the PBS are tolerated or in some circumstances enhance PE activity and fit an initial model where mutation location and identity determine PE efficiency.

[1441] FIG. 142 shows that longer PBS (RNF2, 15 nt) do not tolerate mutations, potentially because they inhibit PBS:protospacer interactions excessively.

[1442] FIG. 143 shows that mutations to the PBS can improve PE efficiency for pegRNAs with shorter optimal PBS's. MutPBS epegRNAs have a mutPBS of 17 with 4 consecutive mutations (HEK3, DNMT1, PRNP) or a mutPBS of fifteen with four consecutive mutations (RNF2), followed by an 8 nt linker and tevopreQ₁.

[1443] FIG. 144 shows that mutPBS improvements can provide additional enhancements in editing efficiency when used in combination with epegRNAs.

[1444] FIG. 145 provides a schematic of twin prime editing. Twin prime editing is particularly useful for making large edits because the flaps are exogenous and can only base pair to one another.

[1445] FIG. 146 shows nicking of the intervening region in twin prime editing to reduce competitive homology for improved editing efficiency. The extra nick (or multiple nicks) degrades the region of the genome between the two flaps, reducing the complexity of intermediates and improving yield.

[1446] FIG. 147 shows MECP2 twin prime editing with an accessory nick.

### Example 6: Treating CDKL5 Deficiency Disorder by Prime Editing

[1447] CDKL5 deficiency disorder is a genetic disease characterized by seizures that begin early in life after birth, with subsequent delays in many aspects of development. The seizures associated with CDKL5 deficiency disorder are often found to change in character with age. The most common type of seizure experienced by affected individuals is called generalized tonic-clonic seizure (aka Grand-mal seizure), which involves a loss of consciousness, muscle rigidity, and bodily convulsions. Tonic seizures represent another major type of seizure affiliated with CDKL5 deficiency disorder and can be characterized by abnormal muscle contractions. Another common seizure type is an epileptic spasm, which involves short episodes of involuntary muscle jerks. Seizures occur daily in most people with CDKL5 deficiency disorder, although seizure-free periods can be experienced. Seizures in CDKL5 deficiency disorder are typically resistant to treatment.

[1448] CDKL5 deficiency disorder is also associated with impaired development in children. Such children have severe intellectual disability with significantly limited speech. In addition, the development of gross motor skills (e.g., walking, sitting, and standing) is delayed or completely absent in certain individuals. In fact, only about one-third of affected individuals are able to walk unassisted. Fine motor skills are also impaired, with only about half of affected individuals having meaningful use of their hands. Vision, too, is impaired in many individuals affected by CDKL5 deficiency disorder.

[1449] CDKL5 deficiency disorder is caused by mutations in the CDKL5 gene. This gene provides instructions for making a protein that is essential for normal brain development and function. In particular, mutations in the CDKL5 gene reduce the amount of functional CDKL5 protein or alter its activity in neurons. A shortage (deficiency) of CDKL5 or impairment of its function disrupts brain development, but it is unclear how these changes cause the specific features of CDKL5 deficiency disorder.

[1450] Current treatments for CDKL5 mutations/deficiencies are primarily focused on managing symptoms. However, there are currently no treatments that improve the neurological outcome of subjects with CDKL5 mutations or deficiencies or that can correct the mutations in the CDKL5 gene that cause the disorder. As such, there exists a need for gene therapy approaches for treating CDKL5 deficiency disorder.

[1451] In the present disclosure, a prime editor (e.g., PE2) was used in complex with a pegRNA as shown in FIG. 148 to correct multiple pathogenic mutations in the CDKL5 gene simultaneously (including correcting the V172I, A173D, R175S, W176G, W176R, Y177C, R178P, P180L, E181A, and L182P mutations). A single prime editor (e.g., PE2) complexed with a single pegRNA was also shown to be capable of correcting a multitude of pathogenic mutations at positions +4, +8, +12, +17, +21, and +25 relative to position 1 of the PAM sequence (i.e., the nucleotide in the 5′-most position; FIG. 149).

### Example 7: Method of Correcting Multiple Mutations in CDKL5 in Mice Using a Single Guide RNA

[1452] The following Example describes the optimization of installation of the pathogenic 1412delA mutation in mouse cells. N2A cells were used for this work as these cells are derived from a neuroblastoma, and CDKL5 Deficiency Disorder (CDD) is largely a neurological disease. Extensive efforts were undertaken to optimize the pegRNA and nicking guides and install this mutation. One such example of this optimization using DNA plasmid transfection is provided in FIG. 150. The PE system, nicking guides, and pegRNA parameters are detailed on the X-axis. The “13_20” pegRNA was used for subsequent synthetic pegRNAs for electroporations.

[1453] N2A cells were next electroporated with either in vitro transcribed PE mRNA, synthetic epegRNA, and synthetic guide RNA (PE3), or the aforementioned substrates with mMLH1neg mRNA (PE5) (FIG. 151). The nicking guide location (NG1 vs NG3) was also varied. It was concluded that the PE5 system with NG1 gives the highest installation percentage, and PE5 with NG3 gives the best desired edit to indel ratio.

[1454] A similar experiment was then performed with the addition of a seed edit being encoded by the epegRNAs, as well as the desired 1412delA mutation (FIG. 152). The seed edit is silent, and therefore not anticipated to be pathogenic since the amino acid sequence is not changed. Two standard nicking guides were used for PE5 (NG1, NG3), in addition to testing a nicking guide for the PE5b strategy. The length of the reverse transcriptase template differs between pegRNA 081 and 082. It was concluded that pegRNA 081 was the most efficient, installing the desired mutation at an efficiency of about 70%.

[1455] Because CDKL5 is caused by dominant mutations on the X chromosome, female patients usually have one healthy allele. The effect of indels at this healthy allele is unknown, and it could be targeted with the canonical PE (SpCas9 PE). New pegRNAs were designed (Table E7) that require an SpCas9-NRCH PE and 1) would not target the healthy allele, and 2) would not be good substrates for subsequent editing once the first editing event has happened because the PAM would be disrupted.

[1456] Finally, one pegRNA was used to correct multiple pathogenic alleles. Since mutations are de novo, it is extremely rare for any two patients to have the same mutation. However, there are loci in the CDKL5 gene that are more likely to harbor these pathogenic mutations than others. One such locus is Exon 8. Multiple pathogenic CDKL5 alleles were installed in HEK293T cells via plasmid transfection (FIG. 153). The two pegRNA parameters are described on the X-axis.

### Example 8: Prime Editing of the CDKL5 Locus with PE4 and PE5

[1457] PE4max and PE5max (FIGS. 154 and 155) were applied to introduce a silent C•G-to-T•A mutation at a CDKL5 site known to contain a causative mutation for CDKL5 deficiency disorder, a severe neurodevelopmental condition (Olson et al., 2019). It was observed that PE4max increased average prime editing efficiency over PE2 by 29-fold in HeLa cells and 2.1-fold in HEK293T cells (FIG. 156). Notably, PE4max editing efficiencies (8.6% editing with 0.19% indels in HeLa cells, and 20% editing with 0.26% indels in HEK293T cells) were similar to or exceeded those of PE3 (4.5% editing with 1.5% indels in HeLa cells, and 24% editing with 5.4% indels in HEK293T cells), but with far fewer indels. In addition, PE5max improved disease-relevant allele conversion over PE3 by an average of 6.1-fold in HeLa cells and 1.5-fold in HEK293T cells, and enhanced edit:indel purity by 6.4-fold in HeLa cells and by 3.5-fold in HEK293T cells (FIG. 156).

[1458] Next, PE4 and PE5 editing systems were evaluated in a cell model of genetic disease and in primary human cells. The pathogenic CDKL5 c.1412delA mutation in human induced pluripotent stem cells (iPSCs) derived from a patient heterozygous for this allele was corrected (Chen et al., 2021). Electroporation of these iPSCs with PE3 components (in vitro-transcribed PE2 mRNA and synthetic pegRNAs and nicking sgRNAs) yielded 17% correction of editable pathogenic alleles and 20% total indel products (FIGS. 157 and 158). Co-electroporation of these components with MLH1dn mRNA for PE5 editing elevated correction efficiency to 34% and lowered the frequency of indels to 6.1%. To further minimize indels, PE4 and PE5b strategies were also used. Without complementary-strand nicking, it was observed that MLH1dn improved allele correction from 4.0% (PE2) to 10% (PE4) with few indels (<0.34%) (FIGS. 157 and 158). Similarly, PE3b resulted in 13% editing of the mutant allele with 4.8% indels, while PE5b elevated editing to 27% with 3.8% indels. Across the PE4, PE5, and PE5b systems tested, MLH1dn enhances correction of the pathogenic CDKL5 c.1412delA mutation by 2.2-fold in efficiency and 3.6-fold in outcome purity in patient-derived iPSCs.

[1459] MLH1dn and epegRNAs were also combined for CDKL5 editing (FIG. 159). Editing efficiency of a CDKL5 c.1412 A to G mutation in HEK293T cells was increased through the use of MLH1dn (PE4 and PE5) and epegRNAs. Finally, the nicking sgRNA was also optimized for prime editing at CDKL5 (FIG. 160). The editing efficiency of installation of a CDKL5 silent +1 C to T mutation (c.1412delA site) in HEK293T cells was increased through such optimization. Sequences of the guide RNAs used in this Example are provided in Table E8.

### Example 9: PAM Variant Prime Editors for Editing the CDKL5 Locus

[1460] A high level of insertion and deletion byproducts (indels) in addition to the intended prime edit was observed when PE4 and PE5 were used to correct the CDKL5 c.1412delA mutation in heterozygous human patient-derived induced pluripotent stem cells. It was hypothesized that many of these indels are caused by attempted prime editing of the wild-type allele, which does not contain the c.1412delA mutation. Specifically, because the c.1412delA mutation is far from the targeted protospacer for SpCas9-PE, this protospacer will still be nicked even for the wild-type allele, thereby generating indel byproducts (FIG. 161).

[1461] To mitigate indels, prime editors were developed that target and nick the DNA only in the presence of the c.1412delA mutation. Prime editors were thus generated that use NRCH and NRTH SpCas9 variants (as described in International Patent Application Publication No. WO 2020/041751). NRCH SpCas9-PE and NRTH SpCas9-PE can target the c.1412delA mutation specifically, such that they are unable bind and nick the wild-type CDKL5 allele (FIGS. 162 and 163).

[1462] Thus, NRCH SpCas9-PE and NRTH SpCas9-PE will only correct the CDKL5 c.1412delA mutation if the mutation is present, which should minimize indel byproducts. The pegRNA and nicking sgRNA sequences used in this strategy are provided in Table E9.

### Example 10: Prime Editors for Installation of CDKL5 Mutations

[1463] Prime editing guide RNAs (pegRNAs) with varying primer binding site (PBS) and template lengths were screened to identify those that enabled the most efficient installation of a transition point mutation at c.1412 in the CDKL5 gene in HEK293T cells using the PE2 prime editor (FIG. 164). Next, the choice of nicking guide used in the PE3 prime editor system was optimized, further improving the efficiency of editing at c.1412 (FIG. 165). A coding-silent transition was also incorporated within the seed region of the protospacer targeted by the pegRNA to further improve editing efficiency (FIG. 165). The guide RNA sequences used in this strategy are provided in Table E10. Overall, the pegRNA CDKL5h37 and the epegRNA JNpeg0953 showed the highest editing efficiency.

### SEQUENCES

[1464] The following sequences in Tables E1-E6 are referred to throughout Example 4 and in the associated Drawings.

Lengthy table referenced here
US20230357766A1-20231109-T00001
Please refer to the end of the specification for access instructions.

Lengthy table referenced here
US20230357766A1-20231109-T00002
Please refer to the end of the specification for access instructions.

Lengthy table referenced here
US20230357766A1-20231109-T00003
Please refer to the end of the specification for access instructions.

Lengthy table referenced here
US20230357766A1-20231109-T00004
Please refer to the end of the specification for access instructions.

Lengthy table referenced here
US20230357766A1-20231109-T00005
Please refer to the end of the specification for access instructions.

Lengthy table referenced here
US20230357766A1-20231109-T00006
Please refer to the end of the specification for access instructions.

Lengthy table referenced here
US20230357766A1-20231109-T00007
Please refer to the end of the specification for access instructions.

Lengthy table referenced here
US20230357766A1-20231109-T00008
Please refer to the end of the specification for access instructions.

Lengthy table referenced here
US20230357766A1-20231109-T00009
Please refer to the end of the specification for access instructions.

Lengthy table referenced here
US20230357766A1-20231109-T00010
Please refer to the end of the specification for access instructions.

### REFERENCES FOR EXAMPLE 4

[1465] 1. Komor, A. C., Badran, A. H. & Liu, D. R. CRISPR-Based Technologies for the Manipulation of Eukaryotic Genomes. Cell 168, 20-36 (2017).
[1466] 2. Anzalone, A. V., Koblan, L. W. & Liu, D. R. Genome editing with CRISPR-Cas nucleases, base editors, transposases and prime editors. Nat Biotechnol 38, 824-844 (2020).
[1467] 3. Cullot, G. et al. CRISPR-Cas9 genome editing induces megabase-scale chromosomal truncations. Nat Commun 10, 1136 (2019).
[1468] 4. Kosicki, M., Tomberg, K. & Bradley, A. Repair of double-strand breaks induced by CRISPR-Cas9 leads to large deletions and complex rearrangements. Nat Biotechnol 36, 765-771 (2018).
[1469] 5. Boroviak, K., Fu, B., Yang, F., Doe, B. & Bradley, A. Revealing hidden complexities of genomic rearrangements generated with Cas9. Sci Rep 7, 12867 (2017).
[1470] 6. Enache, O. M. et al. Cas9 activates the p53 pathway and selects for p53-inactivating mutations. Nat Genet 52, 662-668 (2020).
[1471] 7. Haapaniemi, E., Botla, S., Persson, J., Schmierer, B. & Taipale, J. CRISPR-Cas9 genome editing induces a p53-mediated DNA damage response. Nat Med 24, 927-930 (2018).
[1472] 8. Ihry, R. J. et al. p53 inhibits CRISPR-Cas9 engineering in human pluripotent stem cells. Nat Med 24, 939-946 (2018).
[1473] 9. Leibowitz, M. L. et al. Chromothripsis as an on-target consequence of CRISPR-Cas9 genome editing. Preprint at https://www.biorxiv.org/content/10.1101/2020.07.13.200998v1 (2020).
[1474] 10. Burgio, G. & Teboul, L. Anticipating and Identifying Collateral Damage in Genome Editing. Trends Genet 36, 905-914 (2020).
[1475] 11. Cox, D. B., Platt, R. J. & Zhang, F. Therapeutic genome editing: prospects and challenges. Nat Med 21, 121-131 (2015).
[1476] 12. Komor, A. C., Kim, Y. B., Packer, M. S., Zuris, J. A. & Liu, D. R. Programmable editing of a target base in genomic DNA without double-stranded DNA cleavage. Nature 533, 420-424 (2016).
[1477] 13. Gaudelli, N. M. et al. Programmable base editing of A*T to G*C in genomic DNA without DNA cleavage. Nature 551, 464-471 (2017).
[1478] 14. Anzalone, A. V. et al. Search-and-replace genome editing without double-strand breaks or donor DNA. Nature 576, 149-157 (2019).
[1479] 15. Houseley, J. & Tollervey, D. The many pathways of RNA degradation. Cell 136,763-776 (2009).
[1480] 16. Hendel, A. et al. Chemically modified guide RNAs enhance CRISPR-Cas genome editing in human primary cells. Nat Biotechnol 33, 985-989 (2015).
[1481] 17. Geisberg, J. V., Moqtaderi, Z., Fan, X., Ozsolak, F. & Struhl, K. Global analysis of mRNA isoform half-lives reveals stabilizing and destabilizing elements in yeast. Cell 156, 812-824 (2014).
[1482] 18. Wu, X. & Bartel, D. P. Widespread Influence of 3′-End Structures on Mammalian mRNA Processing and Stability. Cell 169, 905-917 e911 (2017).
[1483] 19. Brown, J. A. et al. Structural insights into the stabilization of MALAT1 noncoding RNA by a bipartite triple helix. Nat Struct Mol Biol 21, 633-640 (2014).
[1484] 20. MacFadden, A. et al. Mechanism and structural diversity of exoribonuclease-resistant RNA structures in flaviviral RNAs. Nat Commun 9, 119 (2018).
[1485] 21. Pijlman, G. P. et al. A highly structured, nuclease-resistant, noncoding RNA produced by flaviviruses is required for pathogenicity. Cell Host Microbe 4, 579-591 (2008).
[1486] 22. Roth, A. et al. A riboswitch selective for the queuosine precursor preQ1 contains an unusually small aptamer domain. Nat Struct Mol Biol 14, 308-317 (2007).
[1487] 23. Anzalone, A. V., Lin, A. J., Zairis, S., Rabadan, R. & Cornish, V. W. Reprogramming eukaryotic translation with ligand-responsive synthetic RNA switches. Nat Methods 13, 453-458 (2016).
[1488] 24. Houck-Loomis, B. et al. An equilibrium-dependent retroviral mRNA switch regulates translational recoding. Nature 480, 561-564 (2011).
[1489] 25. Lorenz, R. et al. ViennaRNA package 2.0. Algorithms Mol Biol 6, 26 (2011).
[1490] 26. Schene, I. F. et al. Prime editing for functional repair in patient-derived disease models. Nat Commun 11, 5352 (2020).
[1491] 27. Kim, D. Y., Moon, S. B., Ko, J. H., Kim, Y. S. & Kim, D. Unbiased investigation of specificities of prime editing systems in human cells. Nucleic Acids Res 48, 10576-10589 (2020).
[1492] 28. Gao, P. et al. Prime editing in mice reveals the essentiality of a single base in driving tissue specific gene expression. Preprint at www.biorxiv.org/content/10.1101/2020.11.07.372748v3.full.pdf (2020).
[1493] 29. Tsai, S. Q. et al. GUIDE-seq enables genome-wide profiling of off-target cleavage by CRISPR-Cas nucleases. Nat Biotechnol 33, 187-197 (2015).
[1494] 30. Ibrahim, H., Wilusz, J. & Wilusz, C. J. RNA recognition by 3′-to-5′ exonucleases: the substrate perspective. Biochim biophys acta 1779, 256-265 (2008).
[1495] 31. Green, L., Kim, C. H., Bustamante, C. & Tinoco, I., Jr. Characterization of the mechanical unfolding of RNA pseudoknots. J Mol Biol 375, 511-528 (2008).
[1496] 32. Chavez, A. et al. Highly efficient Cas9-mediated transcriptional programming. Nat Methods 12, 326-328 (2015).
[1497] 33. Hu, J. H. et al. Evolved Cas9 variants with broad PAM compatibility and high DNA specificity. Nature 556, 57-63 (2018).
[1498] 34. Nahar, S. et al. A G-quadruplex motif at the 3′ end of sgRNAs improves CRISPR-Cas9 based genome editing efficiency. Chem Commun 54, 2377-2380 (2018).
[1499] 35. Steckelberg, A. L. et al. A folded viral noncoding RNA blocks host cell exoribonucleases through a conformationally dynamic RNA structure. Proc Natl Acad Sci USA 115, 6404-6409 (2018).
[1500] 36. Cate, J. H. et al. Crystal structure of a group I ribozyme domain: principles of RNA packing. Science 273, 1678-1685 (1996).
[1501] 37. Fedor, M. J. & Westhof, E. Ribozymes: the first 20 years. Mol Cell 10, 703-704 (2002).
[1502] 38. Chen, X., Zaro, J. L. & Shen, W. C. Fusion protein linkers: property, design and functionality. Adv Drug Deliv Rev 65, 1357-1369 (2013).
[1503] 39. Win, M. N. & Smolke, C. D. A modular and extensible RNA-based gene-regulatory platform for engineering cellular function. Proc Natl Acad Sci USA 104, 14283-14288 (2007).
[1504] 40. Nielsen, S., Yuzenkova, Y. & Zenkin, N. Mechanism of eukaryotic RNA polymerase III transcription termination. Science 340, 1577-1580 (2013).
[1505] 41. Huang, T. P., Newby, G. A. & Liu, D. R. Precision genome editing using cytosine and adenine base editors in mammalian cells. Nat Protoc (2021).
[1506] 42. Basila, M., Kelley, M. L. & Smith, A. V. B. Minimal 2′-O-methyl phosphorothioate linkage modification pattern of synthetic guide RNAs for increased stability and efficient CRISPR-Cas9 gene editing avoiding cellular toxicity. PLoS One 12, e0188593 (2017).
[1507] 43. Mead, S. et al. A novel protective prion protein variant that colocalizes with Kuru exposure. N Engl J Med 361, 2056-2065 (2009).
[1508] 44. Asante, E. A. et al. A naturally occurring variant of the human prion protein completely prevents prion disease. Nature 522, 478-481 (2015).
[1509] 45. Kim, H. K. et al. Predicting the efficiency of prime editing guide RNAs in human cells. Nat Biotechnol (2020).
[1510] 46. Jonsson, T. et al. A mutation in APP protects against Alzheimer's disease and age-related cognitive decline. Nature 488, 96-99 (2012).
[1511] 47. Abifadel, M. et al. Mutations in PCSK9 cause autosomal dominant hypercholesterolemia. Nat Genet 34, 154-156 (2003).
[1512] 48. Bustami, J. et al. Cholesteryl ester transfer protein (CETP) I405V polymorphism and cardiovascular disease in eastern European Caucasians—a cross-sectional study. BMC Geriatr 16, 144 (2016).
[1513] 49. Flannick, J. et al. Loss-of-function mutations in SLC30A8 protect against type 2 diabetes. Nat Genet 46, 357-363 (2014).
[1514] 50. Sakuntabhai, A. et al. A variant in the CD209 promoter is associated with severity of dengue disease. Nat Genet 37, 507-513 (2005).
[1515] 51. Olson, H. E. et al. Cyclin-Dependent Kinase-Like 5 Deficiency Disorder: Clinical Review. Pediatr Neurol 97, 18-25 (2019).
[1516] 52. Al-Saaidi, R. et al. The LMNA mutation p.Arg321Ter associated with dilated cardiomyopathy leads to reduced expression and a skewed ratio of lamin A and lamin C proteins. Exp Cell Res 319, 3010-3019 (2013).
[1517] 53. Ip, J. P. K., Mellios, N. & Sur, M. Rett syndrome: insights into genetic, molecular and circuit mechanisms. Nat Rev Neurosci 19, 368-382 (2018).
[1518] 54. Christodoulou, J., Grimm, A., Maher, T. & Bennetts, B. RettBASE: The IRSA MECP2 variation database—a new mutation database in evolution. Hum Mutat 21, 466-472 (2003).
[1519] 55. Dwivedi, O. P. et al. Loss of ZnT8 function protects against diabetes by enhanced insulin secretion. Nat Genet 51, 1596-1606 (2019).
[1520] 56. Thyme, S. B., Akhmetova, L., Montague, T. G., Valen, E. & Schier, A. F. Internal guide RNA interactions interfere with Cas9-mediated cleavage. Nat Commun 7, 11750 (2016).
[1521] 57. Boyle, E. A. et al. Quantification of Cas9 binding and cleavage across diverse guide sequences maps landscapes of target engagement. Science Advances, in press (2021).
[1522] 58. Gaudelli, N. M. et al. Directed evolution of adenine base editors with increased activity and therapeutic application. Nat Biotechnol 38, 892-900 (2020).
[1523] 59. Clement, K. et al. CRISPResso2 provides accurate and rapid genome editing sequence analysis. Nat Biotechnol 37, 224-226 (2019).
[1524] 60. Pandey, S., Agarwala, P. & Maiti, S. Effect of loops and G-quartets on the stability of RNA G-quadruplexes. J Phys Chem B 117, 6896-6905 (2013).
[1525] 61. Engler, C., Gruetzner, R., Kandzia, R. & Marillonnet, S. Golden gate shuffling: a one-pot DNA shuffling method based on type IIs restriction enzymes. PLoS One 4, e5553 (2009).

### REFERENCES

[1526] All of the following references are each incorporated herein by reference in their entireties.
[1527] 1. Jinek, M. et al. A Programmable Dual-RNA-Guided DNA Endonuclease in Adaptive Bacterial Immunity. Science 337, 816-821 (2012).
[1528] 2. Cong, L. et al. Multiplex Genome Engineering Using CRISPR/Cas Systems. Science 339, 819-823 (2013).
[1529] 3. Komor, A. C., Badran, A. H. & Liu, D. R. CRISPR-Based Technologies for the Manipulation of Eukaryotic Genomes. Cell 168, 20-36 (2017).
[1530] 4. Komor, A. C., Kim, Y. B., Packer, M. S., Zuris, J. A. & Liu, D. R. Programmable editing of a target base in genomic DNA without double-stranded DNA cleavage. Nature 533, 420-424 (2016).
[1531] 5. Nishida, K. et al. Targeted nucleotide editing using hybrid prokaryotic and vertebrate adaptive immune systems. Science 353, aaf8729 (2016).
[1532] 6. Gaudelli, N. M. et al. Programmable base editing of A•T to G•C in genomic DNA without DNA cleavage. Nature 551, 464-471 (2017).
[1533] 7. ClinVar, July 2019.
[1534] 8. Dunbar, C. E. et al. Gene therapy comes of age. Science 359, eaan4672 (2018).
[1535] 9. Cox, D. B. T., Platt, R. J. & Zhang, F. Therapeutic genome editing: prospects and challenges. Nat. Med. 21, 121-131 (2015).
[1536] 10. Adli, M. The CRISPR tool kit for genome editing and beyond. Nat. Commun. 9, 1911 (2018).
[1537] 11. Kleinstiver, B. P. et al. Engineered CRISPR-Cas9 nucleases with altered PAM specificities. Nature 523, 481-485 (2015).
[1538] 12. Kleinstiver, B. P. et al. High-fidelity CRISPR-Cas9 nucleases with no detectable genome-wide off-target effects. Nature 529, 490-495 (2016).
[1539] 13. Hu, J. H. et al. Evolved Cas9 variants with broad PAM compatibility and high DNA specificity. Nature 556, 57-63 (2018).
[1540] 14. Nishimasu, H. et al. Engineered CRISPR-Cas9 nuclease with expanded targeting space. Science 361, 1259-1262 (2018).
[1541] 15. Jasin, M. & Rothstein, R. Repair of strand breaks by homologous recombination. Cold Spring Harb. Perspect. Biol. 5, a012740 (2013).
[1542] 16. Paquet, D. et al. Efficient introduction of specific homozygous and heterozygous mutations using CRISPR/Cas9. Nature 533, 125-129 (2016).
[1543] 17. Kosicki, M., Tomberg, K. & Bradley, A. Repair of double-strand breaks induced by CRISPR-Cas9 leads to large deletions and complex rearrangements. Nat. Biotechnol. 36, 765-771 (2018).
[1544] 18. Haapaniemi, E., Botla, S., Persson, J., Schmierer, B. & Taipale, J. CRISPR-Cas9 genome editing induces a p53-mediated DNA damage response. Nat. Med. 24, 927-930 (2018).
[1545] 19. Ihry, R. J. et al. p53 inhibits CRISPR-Cas9 engineering in human pluripotent stem cells. Nat. Med. 24, 939-946 (2018).
[1546] 20. Richardson, C. D., Ray, G. J., DeWitt, M. A., Curie, G. L. & Corn, J. E. Enhancing homology-directed genome editing by catalytically active and inactive CRISPR-Cas9 using asymmetric donor DNA. Nat. Biotechnol. 34, 339-344 (2016).
[1547] 21. Srivastava, M. et al. An Inhibitor of Nonhomologous End-Joining Abrogates Double-Strand Break Repair and Impedes Cancer Progression. Cell 151, 1474-1487 (2012).
[1548] 22. Chu, V. T. et al. Increasing the efficiency of homology-directed repair for CRISPR-Cas9-induced precise gene editing in mammalian cells. Nat. Biotechnol. 33, 543-548 (2015).
[1549] 23. Maruyama, T. et al. Increasing the efficiency of precise genome editing with CRISPR-Cas9 by inhibition of nonhomologous end joining. Nat. Biotechnol. 33, 538-542 (2015).
[1550] 24. Kim, Y. B. et al. Increasing the genome-targeting scope and precision of base editing with engineered Cas9-cytidine deaminase fusions. Nat. Biotechnol. 35, 371-376 (2017).
[1551] 25. Li, X. et al. Base editing with a Cpf1-cytidine deaminase fusion. Nat. Biotechnol. 36, 324-327 (2018).
[1552] 26. Gehrke, J. M. et al. An APOBEC3A-Cas9 base editor with minimized bystander and off-target activities. Nat. Biotechnol. (2018). doi:10.1038/nbt.4199
[1553] 27. Rees, H. A. & Liu, D. R. Base editing: precision chemistry on the genome and transcriptome of living cells. Nat. Rev. Genet. 1 (2018). doi:10.1038/s41576-018-0059-1.
[1554] 28. Ostertag, E. M. & Kazazian Jr, H. H. Biology of Mammalian L1 Retrotransposons. Annu. Rev. Genet. 35, 501-538 (2001).
[1555] 29. Zimmerly, S., Guo, H., Perlman, P. S. & Lambowltz, A. M. Group II intron mobility occurs by target DNA-primed reverse transcription. Cell 82, 545-554 (1995).
[1556] 30. Luan, D. D., Korman, M. H., Jakubczak, J. L. & Eickbush, T. H. Reverse transcription of R2Bm RNA is primed by a nick at the chromosomal target site: a mechanism for non-LTR retrotransposition. Cell 72, 595-605 (1993).
[1557] 31. Feng, Q., Moran, J. V., Kazazian, H. H. & Boeke, J. D. Human L1 retrotransposon encodes a conserved endonuclease required for retrotransposition. Cell 87, 905-916 (1996).
[1558] 32. Jinek, M. et al. Structures of Cas9 Endonucleases Reveal RNA-Mediated Conformational Activation. Science 343, 1247997 (2014).
[1559] 33. Jiang, F. et al. Structures of a CRISPR-Cas9 R-loop complex primed for DNA cleavage. Science aad8282 (2016). doi:10.1126/science.aad8282
[1560] 34. Qi, L. S. et al. Repurposing CRISPR as an RNA-Guided Platform for Sequence-Specific Control of Gene Expression. Cell 152, 1173-1183 (2013).
[1561] 35. Tang, W., Hu, J. H. & Liu, D. R. Aptazyme-embedded guide RNAs enable ligand-responsive genome editing and transcriptional activation. Nat. Commun. 8, 15939 (2017).
[1562] 36. Shechner, D. M., Hacisuleyman, E., Younger, S. T. & Rinn, J. L. Multiplexable, locus-specific targeting of long RNAs with CRISPR-Display. Nat. Methods 12, 664-670 (2015).
[1563] 37. Anders, C. & Jinek, M. Chapter One—In vitro Enzymology of Cas9. in Methods in Enzymology (eds. Doudna, J. A. & Sontheimer, E. J.) 546, 1-20 (Academic Press, 2014).
[1564] 38. Briner, A. E. et al. Guide RNA Functional Modules Direct Cas9 Activity and Orthogonality. Mol. Cell 56, 333-339 (2014).
[1565] 39. Nowak, C. M., Lawson, S., Zerez, M. & Bleris, L. Guide RNA engineering for versatile Cas9 functionality. Nucleic Acids Res. 44, 9555-9564 (2016).
[1566] 40. Sternberg, S. H., Redding, S., Jinek, M., Greene, E. C. & Doudna, J. A. DNA interrogation by the CRISPR RNA-guided endonuclease Cas9. Nature 507, 62-67 (2014).
[1567] 41. Mohr, S. et al. Thermostable group II intron reverse transcriptase fusion proteins and their use in cDNA synthesis and next-generation RNA sequencing. RNA 19, 958-970 (2013).
[1568] 42. Stamos, J. L., Lentzsch, A. M. & Lambowitz, A. M. Structure of a Thermostable Group II Intron Reverse Transcriptase with Template-Primer and Its Functional and Evolutionary Implications. Mol. Cell 68, 926-939.e4 (2017).
[1569] 43. Zhao, C. & Pyle, A. M. Crystal structures of a group II intron maturase reveal a missing link in spliceosome evolution. Nat. Struct. Mol. Biol. 23, 558-565 (2016).
[1570] 44. Zhao, C., Liu, F. & Pyle, A. M. An ultraprocessive, accurate reverse transcriptase encoded by a metazoan group II intron. RNA 24, 183-195 (2018).
[1571] 45. Ran, F. A. et al. Genome engineering using the CRISPR-Cas9 system. Nat. Protoc. 8, 2281-2308 (2013).
[1572] 46. Liu, Y., Kao, H.-I. & Bambara, R. A. Flap endonuclease 1: a central component of DNA metabolism. Annu. Rev. Biochem. 73, 589-615 (2004).
[1573] 47. Krokan, H. E. & Bjpris, M. Base Excision Repair. Cold Spring Harb. Perspect. Biol.
[1574] 5, (2013).
[1575] 48. Kelman, Z. PCNA: structure, functions and interactions. Oncogene 14, 629-640 (1997).
[1576] 49. Choe, K. N. & Moldovan, G.-L. Forging Ahead through Darkness: PCNA, Still the Principal Conductor at the Replication Fork. Mol. Cell 65, 380-392 (2017).
[1577] 50. Li, X., Li, J., Harrington, J., Lieber, M. R. & Burgers, P. M. Lagging strand DNA synthesis at the eukaryotic replication fork involves binding and stimulation of FEN-1 by proliferating cell nuclear antigen. J. Biol. Chem. 270, 22109-22112 (1995).
[1578] 51. Tom, S., Henricksen, L. A. & Bambara, R. A. Mechanism whereby proliferating cell nuclear antigen stimulates flap endonuclease 1. J. Biol. Chem. 275, 10498-10505 (2000).
[1579] 52. Tanenbaum, M. E., Gilbert, L. A., Qi, L. S., Weissman, J. S. & Vale, R. D. A protein-tagging system for signal amplification in gene expression and fluorescence imaging. Cell 159, 635-646 (2014).
[1580] 53. Bertrand, E. et al. Localization of ASH1 mRNA particles in living yeast. Mol. Cell 2, 437-445 (1998).
[1581] 54. Dahlman, J. E. et al. Orthogonal gene knockout and activation with a catalytically active Cas9 nuclease. Nat. Biotechnol. 33, 1159-1161 (2015).
[1582] 55. Tsai, S. Q. et al. GUIDE-seq enables genome-wide profiling of off-target cleavage by CRISPR-Cas nucleases. Nat. Biotechnol. 33, 187-197 (2015).
[1583] 56. Tsai, S. Q. et al. CIRCLE-seq: a highly sensitive in vitro screen for genome-wide CRISPR-Cas9 nuclease off-targets. Nat. Methods 14, 607-614 (2017).
[1584] 57. Schek N, Cooke C, Alwine J C. Molecular and Cellular Biology. (1992).
[1585] 58. Gil A, Proudfoot NJ. Cell. (1987).
[1586] 59. Zhao, B. S., Roundtree, I. A., He, C. Nat Rev Mol Cell Biol. (2017).
[1587] 60. Rubio, M. A. T., Hopper, A. K. Wiley Interdiscip Rev RNA (2011).
[1588] 61. Shechner, D. M., Hacisuleyman E., Younger, S. T., Rinn, J. L. Nat Methods. (2015).
[1589] 62. Paige, J. S., Wu, K. Y., Jaffrey, S. R. Science (2011).
[1590] 63. Ray D., . . . Hughes T R. Nature (2013).
[1591] 64. Chadalavada, D. M., Cerrone-Szakal, A. L., Bevilacqua, P. C. RNA (2007).
[1592] 65. Forster A C, Symons R H. Cell. (1987).
[1593] 66. Weinberg Z, Kim P B, Chen T H, Li S, Harris K A, Lunse C E, Breaker R R. Nat. Chem. Biol. (2015).
[1594] 67. Feldstein P A, Buzayan J M, Bruening G. Gene (1989).
[1595] 68. Saville B J, Collins R A. Cell. (1990).
[1596] 69. Winkler W C, Nahvi A, Roth A, Collins J A, Breaker R R. Nature (2004).
[1597] 70. Roth A, Weinberg Z, Chen A G, Kim P G, Ames T D, Breaker R R. Nat Chem Biol. (2013).
[1598] 71. Choudhury R, Tsai Y S, Dominguez D, Wang Y, Wang Z. Nat Commun. (2012).
[1599] 72. MacRae IJ, Doudna J A. Curr Opin Struct Biol. (2007).
[1600] 73. Bernstein E, Caudy A A, Hammond S M, Hannon G J Nature (2001).
[1601] 74. Filippov V, Solovyev V, Filippova M, Gill S S. Gene (2000).
[1602] 75. Cadwell R C and Joyce G F. PCR Methods Appl. (1992).
[1603] 76. McInerney P, Adams P, and Hadi M Z. Mol Biol Int. (2014).
[1604] 77. Esvelt K M, Carlson J C, and Liu D R. Nature. (2011).
[1605] 78. Naorem S S, Hin J, Wang S, Lee W R, Heng X, Miller J F, Guo H. Proc Natl Acad Sci USA (2017).
[1606] 79. Martinez M A, Vartanian J P, Wain-Hobson S. Proc Natl Acad Sci USA (1994).
[1607] 80. Meyer A J, Ellefson J W, Ellington A D. Curr Protoc Mol Biol. (2014).
[1608] 81. Wang H H, Isaacs F J, Carr P A, Sun Z Z, Xu G, Forest C R, Church G M. Nature. (2009).
[1609] 82. Nyerges A et al. Proc Natl Acad Sci USA. (2016).
[1610] 83. Mascola J R, Haynes B F. Immunol Rev. (2013).
[1611] 84. X. Wen, K. Wen, D. Cao, G. Li, R. W. Jones, J. Li, S. Szu, Y. Hoshino, L. Yuan, Inclusion of a universal tetanus toxoid CD4(+) T cell epitope P2 significantly enhanced the immunogenicity of recombinant rotavirus ΔVP8* subunit parenteral vaccines. Vaccine 32, 4420-4427 (2014).
[1612] 85. G. Ada, D. Isaacs, Carbohydrate-protein conjugate vaccines. Clin Microbiol Infect 9, 79-85 (2003).
[1613] 86. E. Malito, B. Bursulaya, C. Chen, P. L. Surdo, M. Picchianti, E. Balducci, M. Biancucci, A. Brock, F. Berti, M. J. Bottomley, M. Nissum, P. Costantino, R. Rappuoli, G. Spraggon, Structural basis for lack of toxicity of the diphtheria toxin mutant CRM197. Proceedings of the National Academy of Sciences 109, 5229 (2012).
[1614] 87. J. de Wit, M. E. Emmelot, M. C. M. Poelen, J. Lanfermeijer, W. G. H. Han, C. van Els, P. Kaaijk, The Human CD4(+) T Cell Response against Mumps Virus Targets a Broadly Recognized Nucleoprotein Epitope. J Virol 93, (2019).
[1615] 88. M. May, C. A. Rieder, R. J. Rowe, Emergent lineages of mumps virus suggest the need for a polyvalent vaccine. Int J Infect Dis 66, 1-4 (2018).
[1616] 89. M. Ramamurthy, P. Rajendiran, N. Saravanan, S. Sankar, S. Gopalan, B. Nandagopal, Identification of immunogenic B-cell epitope peptides of rubella virus E1 glycoprotein towards development of highly specific immunoassays and/or vaccine. Conference Abstract, (2019).
[1617] 90. U. S. F. Tambunan, F. R. P. Sipahutar, A. A. Parikesit, D. Kerami, Vaccine Design for H5N1 Based on B- and T-cell Epitope Predictions. Bioinform Biol Insights 10, 27-35 (2016).
[1618] 91. Asante, E A. et. al. “A naturally occurring variant of the human prion protein completely prevents prion disease”. Nature. (2015).
[1619] 92. Crabtree, G. R. & Schreiber, S. L. Three-part inventions: intracellular signaling and induced proximity. Trends Biochem. Sci. 21, 418-22 (1996).
[1620] 93. Liu, J. et al. Calcineurin Is a Common Target of A and FKBP-FK506 Complexes. Cell 66, 807-815 (1991).
[1621] 94. Keith, C. T. et al. A mammalian protein targeted by G1-arresting rapamycin-receptor complex. Nature 369, 756-758 (2003).
[1622] 95. Spencer, D. M., Wandless, T. J., Schreiber, S. L. S. & Crabtree, G. R. Controlling signal transduction with synthetic ligands. Science 262, 1019-24 (1993).
[1623] 96. Pruschy, M. N. et al. Mechanistic studies of a signaling pathway activated by the organic dimerizer FK1012. Chem. Biol. 1, 163-172 (1994).
[1624] 97. Spencer, D. M. et al. Functional analysis of Fas signaling in vivo using synthetic inducers of dimerization. Curr. Biol. 6, 839-847 (1996).
[1625] 98. Belshaw, P. J., Spencer, D. M., Crabtree, G. R. & Schreiber, S. L. Controlling programmed cell death with a cyclophilin-cyclosporin-based chemical inducer of dimerization. Chem. Biol. 3, 731-738 (1996).
[1626] 99. Yang, J. X., Symes, K., Mercola, M. & Schreiber, S. L. Small-molecule control of insulin and PDGF receptor signaling and the role of membrane attachment. Curr. Biol. 8, 11-18 (1998).
[1627] 100. Belshaw, P. J., Ho, S. N., Crabtree, G. R. & Schreiber, S. L. Controlling protein association and subcellular localization with a synthetic ligand that induces heterodimerization of proteins. Proc. Natl. Acad. Sci. 93, 4604-4607 (2002).
[1628] 101. Stockwell, B. R. & Schreiber, S. L. Probing the role of homomeric and heteromeric receptor interactions in TGF-β signaling using small molecule dimerizers. Curr. Biol. 8, 761-773 (2004).
[1629] 102. Spencer, D. M., Graef, I., Austin, D. J., Schreiber, S. L. & Crabtree, G. R. A general strategy for producing conditional alleles of Src-like tyrosine kinases. Proc. Natl. Acad. Sci. 92, 9805-9809 (2006).
[1630] 103. Holsinger, L. J., Spencer, D. M., Austin, D. J., Schreiber, S. L. & Crabtree, G. R. Signal transduction in T lymphocytes using a conditional allele of Sos. Proc. Natl. Acad. Sci. 92, 9810-9814 (2006).
[1631] 104. Myers, M. G. Insulin Signal Transduction and the IRS Proteins. Annu. Rev. Pharmacol. Toxicol. 36, 615-658 (1996).
[1632] 105. Watowich, S. S. The erythropoietin receptor: Molecular structure and hematopoietic signaling pathways. J. Investig. Med. 59, 1067-1072 (2011).
[1633] 106. Blau, C. A., Peterson, K. R., Drachman, J. G. & Spencer, D. M. A proliferation switch for genetically modified cells. Proc. Natd. Acad. Sci. 94, 3076-3081 (2002).
[1634] 107. Clackson, T. et al. Redesigning an FKBP-ligand interface to generate chemical dimerizers with novel specificity. Proc. Natd. Acad. Sci. 95, 10437-10442 (1998).
[1635] 108. Diver, S. T. & Schreiber, S. L. Single-step synthesis of cell-permeable protein dimerizers that activate signal transduction and gene expression. J. Am. Chem. Soc. 119,5106-5109(1997).
[1636] 109. Guo, Z. F., Zhang, R. & Liang, F. Sen. Facile functionalization of FK506 for biological studies by the thiol-ene ‘click’ reaction. RSC Adv. 4, 11400-11403 (2014).
[1637] 110. Robinson, D. R., Wu, Y.-M. & Lin, S.-F. The protein tyrosine kinase family of the human genome. Oncogene 19, 5548-5557 (2000).
[1638] 111. Landrum, M. J. et al. ClinVar: public archive of interpretations of clinically relevant variants. Nucleic Acids Res. 44, D862-D868 (2016).
[1639] 112. Jinek, M. et al. A Programmable Dual-RNA-Guided DNA Endonuclease in Adaptive Bacterial Immunity. Science 337, 816-821 (2012).
[1640] 113. Cong, L. et al. Multiplex Genome Engineering Using CRISPR/Cas Systems. Science 339, 819-823 (2013).
[1641] 114. Mali, P. et al. RNA-Guided Human Genome Engineering via Cas9. Science 339, 823-826 (2013).
[1642] 115. Yang, H. et al. One-Step Generation of Mice Carrying Reporter and Conditional Alleles by CRISPR/Cas-Mediated Genome Engineering. Cell 154, 1370-1379 (2013).
[1643] 116. Kim, S., Kim, D., Cho, S. W., Kim, J. & Kim, J.-S. Highly efficient RNA-guided genome editing in human cells via delivery of purified Cas9 ribonucleoproteins. Genome Res. 24, 1012-1019 (2014).
[1644] 117. Orlando, S. J. et al. Zinc-finger nuclease-driven targeted integration into mammalian genomes using donors with limited chromosomal homology. Nucleic Acids Res. 38, e152-e152 (2010).
[1645] 118. Tsai, S. Q. et al. GUIDE-seq enables genome-wide profiling of off-target cleavage by CRISPR-Cas nucleases. Nat. Biotechnol. 33, 187-197 (2015).
[1646] 119. Suzuki, K. et al. In vivo genome editing via CRISPR/Cas9 mediated homology-independent targeted integration. Nature 540, 144-149 (2016).
[1647] 120. Kosicki, M., Tomberg, K. & Bradley, A. Repair of double-strand breaks induced by CRISPR-Cas9 leads to large deletions and complex rearrangements. Nat. Biotechnol. 36, 765-771 (2018).
[1648] 121. Haapaniemi, E., Botla, S., Persson, J., Schmierer, B. & Taipale, J. CRISPR-Cas9 genome editing induces a p53-mediated DNA damage response. Nat. Med. 24, 927-930 (2018).
[1649] 122. Ihry, R. J. et al. p53 inhibits CRISPR-Cas9 engineering in human pluripotent stem cells. Nat. Med. 24, 939-946 (2018).
[1650] 123. Chapman, J. R., Taylor, M. R. G. & Boulton, S. J. Playing the end game: DNA double-strand break repair pathway choice. Mol. Cell 47, 497-510 (2012).
[1651] 124. Cox, D. B. T., Platt, R. J. & Zhang, F. Therapeutic genome editing: prospects and challenges. Nat. Med. 21, 121-131 (2015).
[1652] 125. Paquet, D. et al. Efficient introduction of specific homozygous and heterozygous mutations using CRISPR/Cas9. Nature 533, 125-129 (2016).
[1653] 126. Chu, V. T. et al. Increasing the efficiency of homology-directed repair for CRISPR-Cas9-induced precise gene editing in mammalian cells. Nat. Biotechnol. 33, 543-548 (2015).
[1654] 127. Maruyama, T. et al. Increasing the efficiency of precise genome editing with CRISPR-Cas9 by inhibition of nonhomologous end joining. Nat. Biotechnol. 33, 538-542 (2015).
[1655] 128. Rees, H. A., Yeh, W.-H. & Liu, D. R. Development of hRad51-Cas9 nickase fusions that mediate HDR without double-stranded breaks. Nat. Commun. 10, 1-12 (2019).
[1656] 129. Komor, A. C., Kim, Y. B., Packer, M. S., Zuris, J. A. & Liu, D. R. Programmable editing of a target base in genomic DNA without double-stranded DNA cleavage. Nature 533, 420-424 (2016).
[1657] 130. Gaudelli, N. M. et al. Programmable base editing of A•T to G•C in genomic DNA without DNA cleavage. Nature 551, 464-471 (2017).
[1658] 131. Gao, X. et al. Treatment of autosomal dominant hearing loss by in vivo delivery of genome editing agents. Nature 553, 217-221 (2018).
[1659] 132. Ingram, V. M. A specific chemical difference between the globins of normal human and sickle-cell anaemia haemoglobin. Nature 178, 792-794 (1956).
[1660] 133. Myerowitz, R. & Costigan, F. C. The major defect in Ashkenazi Jews with Tay-Sachs disease is an insertion in the gene for the alpha-chain of beta-hexosaminidase. J. Biol. Chem. 263, 18587-18589 (1988).
[1661] 134. Zielenski, J. Genotype and Phenotype in Cystic Fibrosis. Respiration 67, 117-133 (2000).
[1662] 135. Mead, S. et al. A Novel Protective Prion Protein Variant that Colocalizes with Kuru Exposure. N. Engl. J. Med. 361, 2056-2065 (2009).
[1663] 136. Marraffini, L. A. & Sontheimer, E. J. CRISPR interference limits horizontal gene transfer in staphylococci by targeting DNA. Science 322, 1843-1845 (2008).
[1664] 137. Barrangou, R. et al. CRISPR provides acquired resistance against viruses in prokaryotes. Science 315, 1709-1712 (2007).
[1665] 138. Jiang, F. & Doudna, J. A. CRISPR-Cas9 Structures and Mechanisms. Annu. Rev. Biophys. 46, 505-529 (2017).
[1666] 139. Hille, F. et al. The Biology of CRISPR-Cas: Backward and Forward. Cell 172, 1239-1259 (2018).
[1667] 140. Luan, D. D., Korman, M. H., Jakubczak, J. L. & Eickbush, T. H. Reverse transcription of R2Bm RNA is primed by a nick at the chromosomal target site: a mechanism for non-LTR retrotransposition. Cell 72, 595-605 (1993).
[1668] 141. Liu, Y., Kao, H.-I. & Bambara, R. A. Flap endonuclease 1: a central component of DNA metabolism. Annu. Rev. Biochem. 73, 589-615 (2004).
[1669] 142. Rees, H. A. & Liu, D. R. Base editing: precision chemistry on the genome and transcriptome of living cells. Nat. Rev. Genet. 19, 770 (2018).
[1670] 143. Richardson, C. D., Ray, G. J., DeWitt, M. A., Curie, G. L. & Corn, J. E. Enhancing homology-directed genome editing by catalytically active and inactive CRISPR-Cas9 using asymmetric donor DNA. Nat. Biotechnol. 34, 339-344 (2016).
[1671] 144. Qi, L. S. et al. Repurposing CRISPR as an RNA-Guided Platform for Sequence-Specific Control of Gene Expression. Cell 152, 1173-1183 (2013).
[1672] 145. Shechner, D. M., Hacisuleyman, E., Younger, S. T. & Rinn, J. L. Multiplexable, locus-specific targeting of long RNAs with CRISPR-Display. Nat. Methods 12, 664-670 (2015).
[1673] 146. Tang, W., Hu, J. H. & Liu, D. R. Aptazyme-embedded guide RNAs enable ligand-responsive genome editing and transcriptional activation. Nat. Commun. 8, 15939 (2017).
[1674] 147. Jinek, M. et al. Structures of Cas9 Endonucleases Reveal RNA-Mediated Conformational Activation. Science 343, 1247997 (2014).
[1675] 148. Nishimasu, H. et al. Crystal Structure of Cas9 in Complex with Guide RNA and Target DNA. Cell 156, 935-949 (2014).
[1676] 149. Jiang, F., Zhou, K., Ma, L., Gressel, S. & Doudna, J. A. A Cas9-guide RNA complex preorganized for target DNA recognition. Science 348, 1477-1481 (2015).
[1677] 150. Baranauskas, A. et al. Generation and characterization of new highly thermostable and processive M-MuLV reverse transcriptase variants. Protein Eng. Des. Sel. 25, 657-668 (2012).
[1678] 151. Gerard, G. F. et al. The role of template-primer in protection of reverse transcriptase from thermal inactivation. Nucleic Acids Res. 30, 3118-3129 (2002).
[1679] 152. Arezi, B. & Hogrefe, H. Novel mutations in Moloney Murine Leukemia Virus reverse transcriptase increase thermostability through tighter binding to template-primer. Nucleic Acids Res. 37, 473-481 (2009).
[1680] 153. Kotewicz, M. L., Sampson, C. M., D'Alessio, J. M. & Gerard, G. F. Isolation of cloned Moloney murine leukemia virus reverse transcriptase lacking ribonuclease H activity. Nucleic Acids Res. 16, 265-277 (1988).
[1681] 154. Shen, M. W. et al. Predictable and precise template-free CRISPR editing of pathogenic variants. Nature 563, 646-651 (2018).
[1682] 155. Thuronyi, B. W. et al. Continuous evolution of base editors with expanded target compatibility and improved activity. Nat. Biotechnol. (2019). doi:10.1038/s41587-019-0193-0
[1683] 156. Kim, Y. B. et al. Increasing the genome-targeting scope and precision of base editing with engineered Cas9-cytidine deaminase fusions. Nat. Biotechnol. 35, 371-376 (2017).
[1684] 157. Koblan, L. W. et al. Improving cytidine and adenine base editors by expression optimization and ancestral reconstruction. Nat. Biotechnol. (2018). doi:10.1038/nbt.4172
[1685] 158. Komor, A. C. et al. Improved base excision repair inhibition and bacteriophage Mu Gam protein yields C:G-to-T:A base editors with higher efficiency and product purity. Sci. Adv. 3, eaao4774 (2017).
[1686] 159. Kleinstiver, B. P. et al. High-fidelity CRISPR-Cas9 nucleases with no detectable genome-wide off-target effects. Nature 529, 490-495 (2016).
[1687] 160. Zuo, E. et al. Cytosine base editor generates substantial off-target single-nucleotide variants in mouse embryos. Science 364, 289-292 (2019).
[1688] 161. Jin, S. et al. Cytosine, but not adenine, base editors induce genome-wide off-target mutations in rice. Science 364, 292-295 (2019).
[1689] 162. Kim, D., Kim, D., Lee, G., Cho, S.-I. & Kim, J.-S. Genome-wide target specificity of CRISPR RNA-guided adenine base editors. Nat. Biotechnol. 37, 430-435 (2019).
[1690] 163. Grunewald, J. et al. Transcriptome-wide off-target RNA editing induced by CRISPR-guided DNA base editors. Nature 569, 433-437 (2019).
[1691] 164. Zhou, C. et al. Off-target RNA mutation induced by DNA base editing and its elimination by mutagenesis. Nature 571, 275-278 (2019).
[1692] 165. Rees, H. A., Wilson, C., Doman, J. L. & Liu, D. R. Analysis and minimization of cellular RNA editing by DNA adenine base editors. Sci. Adv. 5, eaax5717 (2019).
[1693] 166. Ostertag, E. M. & Kazazian Jr, H. H. Biology of Mammalian L1 Retrotransposons. Annu. Rev. Genet. 35, 501-538 (2001).
[1694] 167. Griffiths, D. J. Endogenous retroviruses in the human genome sequence. Genome Biol. 2, REVIEWS1017 (2001).
[1695] 168. Berkhout, B., Jebbink, M. & Zsiros, J. Identification of an Active Reverse Transcriptase Enzyme Encoded by a Human Endogenous HERV-K Retrovirus. J. Virol. 73, 2365-2375 (1999).
[1696] 169. Halvas, E. K., Svarovskaia, E. S. & Pathak, V. K. Role of Murine Leukemia Virus Reverse Transcriptase Deoxyribonucleoside Triphosphate-Binding Site in Retroviral Replication and In Vivo Fidelity. J. Virol. 74, 10349-10358 (2000).
[1697] 170. Dever, D. P. et al. CRISPR/Cas9 Beta-globin Gene Targeting in Human Hematopoietic Stem Cells. Nature 539, 384-389 (2016).
[1698] 171. Park, S. H. et al. Highly efficient editing of the β-globin gene in patient-derived hematopoietic stem and progenitor cells to treat sickle cell disease. Nucleic Acids Res. doi:10.1093/nar/gkz475
[1699] 172. Collinge, J. Prion diseases of humans and animals: their causes and molecular basis. Annu. Rev. Neurosci. 24, 519-550 (2001).
[1700] 173. Asante, E. A. et al. A naturally occurring variant of the human prion protein completely prevents prion disease. Nature 522, 478-481 (2015).
[1701] 174. Anzalone, A. V., Lin, A. J., Zairis, S., Rabadan, R. & Cornish, V. W. Reprogramming eukaryotic translation with ligand-responsive synthetic RNA switches. Nat. Methods 13, 453-458 (2016).
[1702] 175. Badran, A. H. et al. Continuous evolution of Bacillus thuringiensis toxins overcomes insect resistance. Nature 533, 58-63 (2016).
[1703] 176. Anders, C. & Jinek, M. Chapter One—In Vitro Enzymology of Cas9. in Methods in Enzymology (eds. Doudna, J. A. & Sontheimer, E. J.) 546, 1-20 (Academic Press, 2014).
[1704] 177. Pirakitikulr, N., Ostrov, N., Peralta-Yahya, P. & Cornish, V. W. PCRless library mutagenesis via oligonucleotide recombination in yeast. Protein Sci. Publ. Protein Soc. 19, 2336-2346 (2010).
[1705] 178. Clement, K. et al. CRISPResso2 provides accurate and rapid genome editing sequence analysis. Nat. Biotechnol. 37, 224-226 (2019).
[1706] 179. Tsai, S. Q. et al. GUIDE-seq enables genome-wide profiling of off-target cleavage by CRISPR-Cas nucleases. Nat. Biotechnol. 33, 187-197 (2015).
[1707] 180. Kleinstiver, B. P. et al. High-fidelity CRISPR-Cas9 nucleases with no detectable genome-wide off-target effects. Nature 529, 490-495 (2016).
[1708] 181. Koblan, L. W. et al. Improving cytidine and adenine base editors by expression optimization and ancestral reconstruction. Nat. Biotechnol. (2018). doi:10.1038/nbt.4172
[1709] 182. Baranauskas, A. et al. Generation and characterization of new highly thermostable and processive M-MuLV reverse transcriptase variants. Protein Eng. Des. Sel. 25, 657-668 (2012).
[1710] 183. Schechner, D M, Hacisuleyman E., Younger S T, Rinn J L. sNat Methods 664-70 (2015).
[1711] 184. Brown J A, et al. Nat Struct Mol Biol 633-40 (2014).
[1712] 185. Conrad N A and Steitz J A. EMBO J 1831-41 (2005).
[1713] 186. Bartlett J S, et al. Proc Natl Acad Sci USA 8852-7 (1996).
[1714] 187. Mitton-Fry R M, DeGregorio S J, Wang J, Steitz T A, Steitz J A. Science 1244-7 (2010).
[1715] 188. Forster A C, Symons R H. Cell. 1987.
[1716] 189. Weinberg Z, Kim P B, Chen T H, Li S, Harris K A, Lunse C E, Breaker R R. Nat. Chem. Biol. 2015.
[1717] 190. Feldstein P A, Buzayan J M, Bruening G. Gene 1989.
[1718] 191. Saville B J, Collins R A. Cell. 1990.
[1719] 192. Roth A, Weinberg Z, Chen A G, Kim P G, Ames T D, Breaker R R. Nat Chem Biol. 2013.
[1720] 193. Borchardt E K, et al. RNA 1921-30 (2015).
[1721] 194. Zhang Y, et al. Mol Cell 792-806 (2013).
[1722] 195. Dang Y, et al. Genome Biol 280 (2015).
[1723] 196. Schaefer M, Kapoor U, and Jantsch M F. Open Biol 170077 (2017).
[1724] 197. Nahar S, et al. Chem Comm 2377-80 (2018).
[1725] 198. Gao Y and Zhao Y. J Integr Plant Biol 343-9 (2014).
[1726] 199. Dubois N, Marquet R, Paillart J, Bernacchi S. Front Microbiol 527 (2018).
[1727] 200. Costa M and Michel F. EMBO J 1276-85 (1995).
[1728] 201. Hu J H, et al. Nature 57-63 (2018).
[1729] 202. Furukawa K, Gu H, Breaker R R. Methods Mol Biol 209-20 (2014).
[1730] 203. Zettler, J., Schutz, V. & Mootz, H. D. The naturally split Npu DnaE intein exhibits an extraordinarily high rate in the protein trans-splicing reaction. FEBS Lett. 583, 909-914 (2009).
[1731] 204. Kugler, S., Kilic, E. & Bahr, M. Human synapsin 1 gene promoter confers highly neuron-specific long-term transgene expression from an adenoviral vector in the adult rat brain depending on the transduced area. Gene Ther. 10, 337-347 (2003).
[1732] 205. de Felipe, P., Hughes, L. E., Ryan, M. D. & Brown, J. D. Co-translational, intraribosomal cleavage of polypeptides by the foot-and-mouth disease virus 2A peptide. J. Biol. Chem. 278, 11441-11448 (2003).
[1733] 206. Levy, J. M. & Nicoll, R. A. Membrane-associated guanylate kinase dynamics reveal regional and developmental specificity of synapse stability. J. Physiol. 595, 1699-1709 (2017).
[1734] 207. Li, B. & Dewey, C. N. RSEM: accurate transcript quantification from RNA-Seq data with or without a reference genome. BMC Bioinformatics 12, 323 (2011).
[1735] 208. Ritchie, M. E. et al. limma powers differential expression analyses for RNA-sequencing and microarray studies. Nucleic Acids Res. 43, e47-e47 (2015).

### EQUIVALENTS AND SCOPE

[1736] In the articles such as “a,” “an,” and “the” may mean one or more than one unless indicated to the contrary or otherwise evident from the context. Embodiments or descriptions that include “or” between one or more members of a group are considered satisfied if one, more than one, or all of the group members are present in, employed in, or otherwise relevant to a given product or process unless indicated to the contrary or otherwise evident from the context. The invention includes embodiments in which exactly one member of the group is present in, employed in, or otherwise relevant to a given product or process. The invention includes embodiments in which more than one, or all of the group members are present in, employed in, or otherwise relevant to a given product or process.

[1737] Furthermore, the disclosure encompasses all variations, combinations, and permutations in which one or more limitations, elements, clauses, and descriptive terms from one or more of the listed claims is introduced into another claim. For example, any claim that is dependent on another claim can be modified to include one or more limitations found in any other claims that is dependent on the same base claim. Where elements are presented as lists, e.g., in Markush group format, each subgroup of the elements is also disclosed, and any element(s) can be removed from the group. It should it be understood that, in general, where the invention, or aspects of the invention, is/are referred to as comprising particular elements and/or features, certain embodiments of the disclosure or aspects of the disclosure consist, or consist essentially of, such elements and/or features. For purposes of simplicity, those embodiments have not been specifically set forth in haec verba herein. It is also noted that the terms “comprising” and “containing” are intended to be open and permits the inclusion of additional elements or steps. Where ranges are given, endpoints are included. Furthermore, unless otherwise indicated or otherwise evident from the context and understanding of one of ordinary skill in the art, values that are expressed as ranges can assume any specific value or sub-range within the stated ranges in different embodiments of the invention, to the tenth of the unit of the lower limit of the range, unless the context clearly dictates otherwise.

[1738] This application refers to various issued patents, published patent applications, journal articles, and other publications, all of which are incorporated herein by reference. If there is a conflict between any of the incorporated references and the instant specification, the specification shall control. In addition, any particular embodiment of the present invention that falls within the prior art may be explicitly excluded from any one or more of the embodiments. Because such embodiments are deemed to be known to one of ordinary skill in the art, they may be excluded even if the exclusion is not set forth explicitly herein. Any particular embodiment of the invention can be excluded from any embodiment, for any reason, whether or not related to the existence of prior art.

[1739] Those skilled in the art will recognize or be able to ascertain using no more than routine experimentation many equivalents to the specific embodiments described herein. The scope of the present embodiments described herein is not intended to be limited to the above Description, but rather is as set forth in the appended embodiments. Those of ordinary skill in the art will appreciate that various changes and modifications to this description may be made without departing from the spirit or scope of the present invention, as defined in the following embodiments.

LENGTHY TABLES
The patent application contains a lengthy table section. A copy of the table is available in electronic form from the USPTO web site (https://seqdata.uspto.gov/?pageRequest=docDetail&DocID=US20230357766A1). An electronic copy of the table will also be available from the USPTO upon request and payment of the fee set forth in 37 CFR 1.19(b)(3).

1. A pegRNA for prime editing comprising a guide RNA and at least one nucleic acid extension arm comprising a DNA synthesis template and a primer binding site, wherein the extension arm comprises a nucleic acid moiety attached thereto selected from the group consisting of a toe-loop, hairpin, stem-loop, pseudoknot, aptamer, G-quadraplex, tRNA, riboswitch, or ribozyme.

2. The pegRNA of claim 1, wherein the nucleic acid moiety is attached to the 3′ end of the extension arm.

3. The pegRNA of claim 1, wherein the nucleic acid moiety is attached to the 5′ end of the extension arm.

4. The pegRNA of claim 1, wherein the pseudoknot is a Mpknot1 moiety having a nucleotide sequence selected from the group consisting of: SEQ ID NO: 195 (Mpknot1), SEQ ID NO: 196 (Mpknot1 3′ trimmed), SEQ ID NO: 197 (Mpknot1 with 5′ extra), SEQ ID NO: 198 (Mpknot1 U38A), SEQ ID NO: 199 (Mpknot1 U38A A29C), SEQ ID NO: 200 (MMLC A29C), SEQ ID NO: 201 (Mpknot1 with 5′ extra and U38A), SEQ ID NO: 202 (Mpknot1 with 5′ extra and U38A A29C), and SEQ ID NO: 203 (Mpknot1 with 5′ extra and A29C), or a nucleotide sequence having at least 80% sequence identity therewith.

5. The pegRNA of claim 1, wherein the G-quadruplex has a nucleotide sequence selected from the group consisting of: SEQ ID NO: 204 (tns1), SEQ ID NO: 205 (stk40), SEQ ID NO: 206 (apc2), SEQ ID NO: 207 (ceacam4), SEQ ID NO: 208 (pitpnm3), SEQ ID NO: 209 (rlf), SEQ ID NO: 210 (erc1), SEQ ID NO: 211 (ube3c), SEQ ID NO: 212(taf15), SEQ ID NO: 213 (stard3), and SEQ ID NO: 214 (g2), or a nucleotide sequence having at least 80% sequence identity therewith.

6. The pegRNA of claim 1, wherein the evopreq1 has a nucleotide sequence selected from the group consisting of: SEQ ID NO: 215 (evopreq1), SEQ ID NO: 216 (evopreq1motif1), SEQ ID NO: 217 (evopreq1motif2), SEQ ID NO: 218 (evopreq1motif3), SEQ ID NO: 219 (shorter preq1-1), SEQ ID NO: 220 (preq1-1 G5C (mut1)), and SEQ ID NO: 221 (preq1-1 G15C (mut2)), or a nucleotide sequence having at least 80% sequence identity therewith.

7. The pegRNA of claim 1, wherein the tRNA moiety has a nucleotide sequence of SEQ ID NO: 222, or a nucleotide sequence having at least 80% sequence identity therewith.

8. The pegRNA of claim 1, wherein the nucleic acid moiety has a nucleotide sequence of SEQ ID NO: 223 (xrn1), or a nucleotide sequence having at least 80% sequence identity therewith.

9. The pegRNA of claim 1, wherein the nucleic acid moiety has a nucleotide sequence of SEQ ID NO: 224 (grp1 intron P4P6), or a nucleotide sequence having at least 80% sequence identity therewith.

10. The pegRNA of any of claims 1-9, wherein the nucleic acid moiety is attached to the pegRNA by a linker.

11. The pegRNA of claim 10, wherein the linker has a nucleotide sequence selected from the group consisting of SEQ ID NOs: 225-236.

12. The pegRNA of claim 10, wherein the linker is at least 3 nucleotides, at least 4 nucleotides, at least 5 nucleotides, at least 6 nucleotides, at least 7 nucleotides, at least 8 nucleotides, at least 9 nucleotides, at least 10 nucleotides, at least 11 nucleotides, at least 12 nucleotides, at least 13 nucleotides, at least 14 nucleotides, at least 15 nucleotides, at least 16 nucleotides, at least 17 nucleotides, at least 18 nucleotides, at least 19 nucleotides, at least 20 nucleotides, at least 21 nucleotides, at least 22 nucleotides, at least 23 nucleotides, at least 24 nucleotides, at least 25 nucleotides, at least 26 nucleotides, at least 27 nucleotides, at least 28 nucleotides, at least 29 nucleotides, or at least 30 nucleotides in length, wherein the linker is no longer than 50 nucleotides.

13. The pegRNA of claim 10, wherein the linker is 8 nucleotides in length.

14. The pegRNA of claim 1, wherein the extension arm is positioned at the 3′ or 5′ end of the guide RNA, and wherein the nucleic acid extension arm is DNA or RNA.

15. The pegRNA of claim 1, wherein the pegRNA is capable of binding to a napDNAbp and directing the napDNAbp to a target DNA sequence.

16. The pegRNA of claim 15, wherein the target DNA sequence comprises a target strand and a complementary non-target strand.

17. The pegRNA of claim 16, wherein the guide RNA hybridizes to the target strand to form an RNA-DNA hybrid and an R-loop.

18. The pegRNA of claim 1, wherein the nucleic acid extension arm is at least 5 nucleotides, at least 6 nucleotides, at least 7 nucleotides, at least 8 nucleotides, at least 9 nucleotides, at least 10 nucleotides, at least 11 nucleotides, at least 12 nucleotides, at least 13 nucleotides, at least 14 nucleotides, at least 15 nucleotides, at least 16 nucleotides, at least 17 nucleotides, at least 18 nucleotides, at least 19 nucleotides, at least 20 nucleotides, at least 21 nucleotides, at least 22 nucleotides, at least 23 nucleotides, at least 24 nucleotides, at least 25 nucleotides, at least 26 nucleotides, at least 27 nucleotides, at least 28 nucleotides, at least 29 nucleotides, at least 30 nucleotides, at least 31 nucleotides, at least 32 nucleotides, at least 33 nucleotides, at least 34 nucleotides, at least 35 nucleotides, at least 36 nucleotides, at least 37 nucleotides, at least 38 nucleotides, at least 39 nucleotides, at least 40 nucleotides, at least 41 nucleotides, at least 42 nucleotides, at least 43 nucleotides, at least 44 nucleotides, at least 45 nucleotides, at least 46 nucleotides, at least 47 nucleotides, at least 48 nucleotides, at least 49 nucleotides, or at least 50 nucleotides.

19. The pegRNA of claim 1, wherein the DNA synthesis template is at least 3 nucleotides, at least 4 nucleotides, at least 5 nucleotides, at least 6 nucleotides, at least 7 nucleotides, at least 8 nucleotides, at least 9 nucleotides, at least 10 nucleotides, at least 11 nucleotides, at least 12 nucleotides, at least 13 nucleotides, at least 14 nucleotides, or at least 15 nucleotides in length.

20. The pegRNA of claim 1, wherein the DNA synthesis template encodes a desired edit.

21. The pegRNA of claim 1, wherein the primer binding site is at least 3 nucleotides, at least 4 nucleotides, at least 5 nucleotides, at least 6 nucleotides, at least 7 nucleotides, at least 8 nucleotides, at least 9 nucleotides, at least 10 nucleotides, at least 11 nucleotides, at least 12 nucleotides, at least 13 nucleotides, at least 14 nucleotides, or at least 15 nucleotides in length.

22. A complex for prime editing comprising:
(a) fusion protein comprising a nucleic acid programmable DNA binding protein (napDNAbp) and a domain comprising an RNA-dependent DNA polymerase activity; and
(b) a pegRNA of any one of claims 1-21.

23. The complex of claim 22, wherein the napDNAbp has a nickase activity.

24. The complex of claim 22, wherein the napDNAbp is a Cas9 protein or variant thereof.

25. The complex of claim 22, wherein the napDNAbp is a nuclease active Cas9, a nuclease inactive Cas9 (dCas9), or a Cas9 nickase (nCas9).

26. The complex of claim 22, wherein the napDNAbp is Cas9 nickase (nCas9).

27. The complex of claim 22, wherein the napDNAbp is selected from the group consisting of: Cas9, Cas12e, Cas12d, Cas12a, Cas12b1, Cas12b2, Cas13a, Cas12c, Cas12d, Cas12e, Cas12h, Cas12i, Cas12g, Cas12f (Cas14), Cas12f1, Cas12j (Cas Φ), and Argonaute and optionally has a nickase activity.

28. The complex of claim 22, wherein the domain comprising an RNA-dependent DNA polymerase activity is a reverse transcriptase comprising any one of the amino acid sequences of SEQ ID NOs: 32, 34, 36, 102-128, and 132.

29. The complex of claim 22, wherein the domain comprising an RNA-dependent DNA polymerase activity is a reverse transcriptase comprising an amino acid sequence having at least 80%, 85%, 90%, 95%, 98%, or 99% sequence identity with the amino acid sequence of any one of SEQ ID NOs: 32, 34, 36, 102-128, and 132.

30. The complex of claim 22, wherein the domain comprising an RNA-dependent DNA polymerase activity is a naturally-occurring reverse transcriptase from a retrovirus or a retrotransposon.

31. A nucleic acid molecule encoding the pegRNA of any one of claim 1-19.

32. An expression vector comprising the nucleic acid molecule of claim 31, wherein the nucleic acid molecule is under the control of a promoter.

33. The expression vector of claim 32, wherein the promoter is a polIII promoter.

34. The expression vector of claim 32, wherein the promoter is a U6 promoter.

35. The expression vector of claim 32, wherein the promoter is a U6, U6v4, U6v7, or U6v9 promoter, or a fragment thereof.

36. A cell comprising the pegRNA of any one of claims 1-21.

37. A cell comprising the complex of any one of claims 22-30.

38. A cell comprising the nucleic acid molecule of claim 31.

39. A cell comprising the expression vector of any one of claims 32-35.

40. A pharmaceutical composition comprising: (i) a pegRNA of any one of claims 1-21, a complex of any one of claims 22-30, a nucleic acid molecule of claim 31, an expression vector of any one of claims 32-35, or a cell of any one of claims 36-39, and (ii) a pharmaceutically acceptable excipient.

41. A kit composition comprising: (i) a pegRNA of any one of claims 1-21, a complex of any one of claims 22-30, a nucleic acid molecule of claim 31, an expression vector of any one of claims 32-35, or a cell of any one of claims 36-39, and (ii) a set of instructions for conducting prime editing.

42. A method of prime editing comprising contacting a target DNA sequence with a pegRNA of any of claims 1-21 and a prime editor comprising a napDNAbp and a domain having an RNA-dependent DNA polymerase activity, wherein the editing efficiency is increased as compared to the same method using a pegRNA not comprising the modification.

43. The method of claim 42, wherein the editing efficiency is increased by at least 1.5 fold.

44. The method of claim 42, wherein the editing efficiency is increased by at least 2 fold.

45. The method of claim 42, wherein the editing efficiency is increased by at least 3 fold.

46. The method of claim 42, wherein the napDNAbp has a nickase activity.

47. The method of claim 42, wherein the napDNAbp is a Cas9 protein or variant thereof.

48. The method of claim 47, wherein the napDNAbp is a nuclease active Cas9, a nuclease inactive Cas9 (dCas9), or a Cas9 nickase (nCas9).

49. The method of claim 48, wherein the napDNAbp is Cas9 nickase (nCas9).

50. The method of claim 42, wherein the napDNAbp is selected from the group consisting of: Cas9, Cas12e, Cas12d, Cas12a, Cas12b1, Cas12b2, Cas13a, Cas12c, Cas12d, Cas12e, Cas12h, Cas12i, Cas12g, Cas12f (Cas14), Cas12f1, Cas12j (CasΦ), and Argonaute and optionally has a nickase activity.

51. The method of claim 42, wherein the domain comprising an RNA-dependent DNA polymerase activity is a reverse transcriptase comprising any one of the amino acid sequences of SEQ ID NOs: 32, 34, 36, 102-128, and 132.

52. The method of claim 42, wherein the domain comprising an RNA-dependent DNA polymerase activity is a reverse transcriptase comprising an amino acid sequence having at least 80%, 85%, 90%, 95%, 98%, or 99% sequence identity with the amino acid sequence of any one of SEQ ID NOs: 32, 34, 36, 102-128, and 132.

53. The method of claim 42, wherein the domain comprising an RNA-dependent DNA polymerase activity is a naturally-occurring reverse transcriptase from a retrovirus or a retrotransposon.

54. The pegRNA of claim 10, wherein the linker is designed by a computational method of claim 56.

55. A method for precisely installing a nucleotide edit in a double stranded target DNA sequence, the method comprising: contacting the double stranded target DNA sequence with a prime editor comprising a nucleic acid programmable DNA binding protein (napDNAbp), a DNA polymerase, and a prime editing guide RNA (PEgRNA), wherein the PEgRNA comprises:
(a) a spacer that hybridizes to a first strand of the double stranded target DNA sequence;
(b) an extension arm that hybridizes to a second strand of the double stranded target DNA sequence;
(c) a DNA synthesis template comprising the nucleotide edit;
(d) a gRNA core that interacts with the napDNAbp;
(e) a nucleic acid moiety attached thereto selected from the group consisting of a toe-loop, hairpin, stem-loop, pseudoknot, aptamer, G-quadraplex, tRNA, riboswitch, or ribozyme; and
(f) a linker that couples the nucleic acid moiety to the pegRNA,
wherein the linker is designed by a computational model; and
wherein the PEgRNA directs the prime editor to install the nucleotide edit in the double stranded target DNA sequence.

56. A method for identifying at least one nucleic acid linker for coupling a prime editing guide RNA (pegRNA) to a nucleic acid moiety, the method comprising:
using at least one computer hardware processor to perform:
generating a plurality of nucleic acid linker candidates including a first nucleic acid linker candidate;
identifying the at least one nucleic acid linker from among the plurality of nucleic acid linker candidates at least in part by:
calculating multiple scores for each of at least some of the plurality of nucleic acid linker candidates, the calculating comprising calculating a first set of scores for the first nucleic acid linker candidate, the first set of scores comprising:
a first score indicative of a degree of interaction between the first nucleic acid linker candidate and a first region of the pegRNA;
a second score indicative of a degree of interaction between the first nucleic acid linker candidate and a second region of the pegRNA; and
identifying the at least one nucleic acid linker from among the at least some of the plurality of nucleic acid linker candidates using the calculated multiple scores; and
outputting information indicative of the at least one nucleic acid linker.

57. The method of claim 56, wherein the first score is indicative of a degree to which the first nucleic acid linker candidate is predicted to avoid interaction with the first region of the pegRNA, and wherein the second score is indicative of a degree to which the first nucleic acid linker candidate is predicted to avoid interaction with the second region of the pegRNA.

58. The method of claim 57, wherein the first region comprises a primer binding site (PBS) of the pegRNA.

59. The method of claim 58, wherein the second region comprises a spacer of the pegRNA.

60. The method of claim 57, wherein the first set of scores further comprises a third score indicative of a degree to which the first nucleic acid linker candidate is predicted to avoid interaction with a third region of the pegRNA and a fourth score indicative of a degree to which the first nucleic acid linker candidate is predicted to avoid interaction with a fourth region of the pegRNA.

61. The method of claim 60, wherein the third region comprises a DNA synthesis template.

62. The method of claim 61, wherein the fourth region comprises a gRNA core that interacts with a nucleic acid programmable DNA binding protein (napDNAbp).

63. The method of claim 60,
wherein the pegRNA is for installing a nucleotide edit in a double stranded target DNA sequence,
wherein the pegRNA comprises:
a spacer that hybridizes to a first strand of the double stranded target DNA sequence,
an extension arm that hybridizes to a second strand of the double stranded target DNA sequence, the extension arm comprising a primer binding site (PBS) and a DNA synthesis template comprising the nucleotide edit, and
a gRNA core that interacts with a nucleic acid programmable DNA binding protein napDNAbp, and
wherein the first region comprises the PBS, the second region comprises the spacer, the third region comprises the DNA synthesis template, and the fourth region comprises the gRNA core.

64. The method of claim 56, wherein the plurality of nucleic acid linker candidates comprises a second nucleic acid linker candidate, and wherein identifying the at least one nucleic acid linker from among the at least some of the plurality of nucleic acid linker candidates using the calculated multiple scores comprises:
comparing the first set of scores for the first nucleic acid linker candidate with a second set of scores for the second nucleic acid linker candidate.

65. The method of claim 64, wherein:
the first region comprises a primer binding site (PBS),
the first score in the first set of scores is indicative of a degree to which the first nucleic acid linker candidate is predicted to avoid interaction with the first region of the pegRNA,
a third score in the second set of scores is indicative of a degree to which the second nucleic acid linker candidate is predicted to avoid interaction with the first region of the pegRNA, and
comparing the first set of scores with the second set of scores comprises:
comparing the first score with the third score.

66. The method of claim 65, wherein when the first score is equal to or is within a threshold distance of the third score, comparing the first set of scores with the second set of scores further comprises:
comparing a score, other than the first score, in the first set of scores with another score, other than the third score, in the second set of scores.

67. A PEgRNA for prime editing comprising (i) a guide RNA comprising a spacer and (ii) at least one nucleic acid extension arm comprising a DNA synthesis template, a primer binding site, a toehold motif, and an additional nucleic acid moiety.

68. The PEgRNA of claim 67, wherein the toehold motif and the additional nucleic acid moiety are attached to the 3′ end of the extension arm.

69. The PEgRNA of claim 67 or 68, wherein the toehold motif is attached to the 3′ end of the extension arm, and the additional nucleic acid moiety is attached to the 3′ end of the toehold motif.

70. The PEgRNA of any one of claims 67-69, wherein the toehold motif is attached to the PEgRNA by a linker.

71. The PEgRNA of claim 70, wherein the linker is at least 3, at least 4, at least 5, at least 6, at least 7, at least 8, at least 9, at least 10, at least 11, at least 12, at least 13, at least 14, at least 15, at least 16, at least 17, at least 18, at least 19, at least 20, at least 21, at least 22, at least 23, at least 24, at least 25, at least 26, at least 27, at least 28, at least 29, or at least 30 nucleotides in length.

72. The PEgRNA of any one of claims 67-71, wherein the PEgRNA is capable of binding to a nucleic acid programmable DNA binding protein (napDNAbp) of a prime editor and directing the napDNAbp to a target DNA sequence.

73. A prime editing system for site specific genome modification comprising (a) a PEgRNA of any one of claims 67-72, and (b) a prime editor comprising (i) a napDNAbp, (ii) a DNA polymerase, and (iii) a portion that binds to the toehold motif of the PEgRNA.

74. The system of claim 73, wherein the portion of the prime editor that binds to the toehold motif of the PEgRNA is fused to the N-terminal end of the prime editor.

75. The system of claim 73, wherein the portion of the prime editor that binds to the toehold motif of the PEgRNA is fused to the C-terminal end of the prime editor.

76. The system of any one of claims 73-75, wherein the portion of the prime editor that binds to the toehold motif of the PEgRNA is fused to the prime editor by a linker.

77. The system of claim 76, wherein the linker is at least 3, at least 4, at least 5, at least 6, at least 7, at least 8, at least 9, at least 10, at least 11, at least 12, at least 13, at least 14, at least 15, at least 16, at least 17, at least 18, at least 19, at least 20, at least 21, at least 22, at least 23, at least 24, at least 25, at least 26, at least 27, at least 28, at least 29, at least 30, or more than 30 amino acids in length.

78. The system of claim 76 or 77, wherein the linker comprises an xten linker.

79. The system of any one of claims 73-78, wherein the portion of the prime editor that binds to the toehold motif of the PEgRNA comprises an MS2 bacteriophage coat protein.

80. The system of any one of claims 73-79, wherein the napDNAbp has a nickase activity.

81. The system of any one of claims 73-80, wherein the napDNAbp is a Cas9 protein or a variant thereof.

82. The system of any one of claims 73-79, wherein the napDNAbp is a nuclease active Cas9, a nuclease inactive Cas9 (dCas9), or a Cas9 nickase (nCas9).

83. The system of any one of claims 73-79, wherein the napDNAbp is a Cas9 nickase (nCas9).

84. The system of any one of claims 73-79, wherein the napDNAbp is selected from the group consisting of: Cas9, Cas12e, Cas12d, Cas12a, Cas12b1, Cas12b2, Cas13a, Cas12c, Cas12d, Cas12e, Cas12h, Cas12i, Cas12g, Cas12f (Cas14), Cas12f1, Cas12j (CasΦ), and Argonaute, and optionally has a nickase activity.

85. A polynucleotide comprising the PEgRNA of any one of claims 67-72.

86. A vector comprising the polynucleotide of claim 85.

87. A cell comprising the PEgRNA of any one of claims 67-72, the system of any one of claims 73-84, the polynucleotide of claim 85, or the vector of claim 86.

88. A pharmaceutical composition comprising (i) the PEgRNA of any one of claims 67-72, the system of any one of claims 73-84, the polynucleotide of claim 85, or the vector of claim 86, and (ii) a pharmaceutically acceptable excipient.

89. A kit comprising the PEgRNA of any one of claims 67-72, the system of any one of claims 73-84, the polynucleotide of claim 85, the vector of claim 86, or the cell of claim 87.

90. A method of prime editing comprising providing a target DNA sequence to the system of any one of claims 73-84, wherein the target DNA sequence is contacted with the PEgRNA and the prime editor of the system.

91. A pair of PEgRNAs for prime editing comprising
(i) a first PEgRNA comprising a guide RNA and at least one nucleic acid extension arm comprising a DNA synthesis template and a primer binding site, wherein the extension arm comprises a nucleic acid moiety attached thereto selected from the group consisting of a toe-loop, hairpin, stem-loop, pseudoknot, aptamer, G-quadraplex, tRNA, riboswitch, or ribozyme; and
(ii) a second PEgRNA comprising a second strand nicking guide RNA, wherein the second strand nicking guide RNA comprises at least one nucleic acid extension arm comprising a DNA synthesis template and a primer binding site.

92. The pair of PEgRNAs of claim 91, wherein the first PEgRNA and the second PEgRNA are each capable of binding to a nucleic acid programmable DNA binding protein (napDNAbp) of a prime editor and directing the napDNAbp to a target DNA sequence.

93. A prime editing system for site specific genome modification comprising (a) a pair of PEgRNAs of claim 91 or 92, and (b) at least one prime editor comprising a napDNAbp and a DNA polymerase.

94. The system of claim 93, wherein the system comprises a first prime editor and second prime editor, each comprising a napDNAbp and a DNA polymerase.

95. The system of claim 94, wherein the napDNAbp of the first prime editor binds to the first PEgRNA of the pair of PEgRNAs, and wherein the napDNAbp of the second prime editor binds to the second PEgRNA of the pair of PEgRNAs.

96. The system of any one of claims 93-95, wherein the napDNAbp has a nickase activity.

97. The system of any one of claims 93-95, wherein the napDNAbp is a Cas9 protein or a variant thereof.

98. The system of any one of claims 93-95, wherein the napDNAbp is a nuclease active Cas9, a nuclease inactive Cas9 (dCas9), or a Cas9 nickase (nCas9).

99. The system of any one of claims 93-95, wherein the napDNAbp is a Cas9 nickase (nCas9).

100. The system of any one of claims 93-95, wherein the napDNAbp is selected from the group consisting of: Cas9, Cas12e, Cas12d, Cas12a, Cas12b1, Cas12b2, Cas13a, Cas12c, Cas12d, Cas12e, Cas12h, Cas12i, Cas12g, Cas12f (Cas14), Cas12f1, Cas12j (CasΦ), and Argonaute, and optionally has a nickase activity.

101. A polynucleotide comprising the PEgRNA of claim 91 or 92.

102. A vector comprising the polynucleotide of claim 101.

103. A cell comprising the PEgRNA of claim 91 or 92, the system of any one of claims 93-100, the polynucleotide of claim 101, or the vector of claim 102.

104. A pharmaceutical composition comprising (i) the PEgRNA of claim 91 or 92, the system of any one of claims 93-100, the polynucleotide of claim 101, or the vector of claim 102, and (ii) a pharmaceutically acceptable excipient.

105. A kit comprising the PEgRNA of claim 91 or 92, the system of any one of claims 93-100, the polynucleotide of claim 101, the vector of claim 102, or the cell of claim 103.

106. A method of prime editing comprising providing a target DNA sequence to the system of any one of claims 93-100, wherein the target DNA sequence is contacted with the pair of PEgRNAs and the one or more prime editors of the system.

107. A PEgRNA comprising (i) a guide RNA comprising a spacer and (ii) at least one nucleic acid extension arm comprising a DNA synthesis template and a primer binding site, wherein the primer binding site comprises one or more modified nucleotides which result in a greater reduction in binding affinity of the primer binding site to the spacer than of the primer binding site to a protospacer sequence on a target DNA molecule.

108. The PEgRNA of claim 107, wherein the one or more modified nucleotides comprise genetic mutations.

109. The PEgRNA of claim 107, wherein the one or more modified nucleotides comprise chemically-modified nucleotides.

110. A prime editing system for site specific genome modification comprising (a) a pair of PEgRNAs of any one of claims 107-109, and (b) at least one prime editor comprising a napDNAbp and a DNA polymerase.

111. The system of claim 110, wherein the system comprises a first prime editor and second prime editor, each comprising a napDNAbp and a DNA polymerase.

112. The system of claim 111, wherein the napDNAbp of the first prime editor binds to the first PEgRNA of the pair of PEgRNAs, and wherein the napDNAbp of the second prime editor binds to the second PEgRNA of the pair of PEgRNAs.

113. The system of any one of claims 110-112, wherein the napDNAbp has a nickase activity.

114. The system of any one of claims 110-112, wherein the napDNAbp is a Cas9 protein or a variant thereof.

115. The system of any one of claims 110-112, wherein the napDNAbp is a nuclease active Cas9, a nuclease inactive Cas9 (dCas9), or a Cas9 nickase (nCas9).

116. The system of any one of claims 110-112, wherein the napDNAbp is a Cas9 nickase (nCas9).

117. The system of any one of claims 110-112, wherein the napDNAbp is selected from the group consisting of: Cas9, Cas12e, Cas12d, Cas12a, Cas12b1, Cas12b2, Cas13a, Cas12c, Cas12d, Cas12e, Cas12h, Cas12i, Cas12g, Cas12f (Cas14), Cas12f1, Cas12j (CasΦ), and Argonaute, and optionally has a nickase activity.

118. A polynucleotide comprising the PEgRNA of any one of claims 107-109.

119. A vector comprising the polynucleotide of claim 118.

120. A cell comprising the PEgRNA of any one of claims 107-109, the system of any one of claims 110-117, the polynucleotide of claim 118, or the vector of claim 119.

121. A pharmaceutical composition comprising (i) the PEgRNA of any one of claims 107-109, the system of any one of claims 110-117, the polynucleotide of claim 118, or the vector of claim 119, and (ii) a pharmaceutically acceptable excipient.

122. A kit comprising the PEgRNA of any one of claims 107-109, the system of any one of claims 110-117, the polynucleotide of claim 118, the vector of claim 119, or the cell of claim 120.

123. A method of prime editing comprising providing a target DNA sequence to the system of any one of claims 110-117, wherein the target DNA sequence is contacted with the pair of PEgRNAs and the one or more prime editors of the system.

124. A method of correcting one or more mutations in a CDKL5 gene by prime editing using a single pegRNA comprising contacting a target DNA sequence with a prime editor comprising (i) a napDNAbp and (ii) a domain having an RNA-dependent DNA polymerase activity, and a pegRNA, wherein the pegRNA targets the prime editor to a CDKL5 gene comprising one or more mutations.

125. The method of claim 124, wherein the pegRNA is provided in FIG. 146.

126. The method of claim 124, wherein the pegRNA is provided in FIG. 148.

127. The method of claim 124, wherein the mutation in the CDKL5 gene comprises a 1412delA mutation.

128. The method of claim 124, wherein the one or more mutations encodes a V1721, A173D, R175S, W176G, W176R, Y177C, R178P, P180L, E181A, or L182P substitution.

129. The method of claim 124, wherein the napDNAbp has a nickase activity.

130. The method of claim 124, wherein the napDNAbp is a Cas9 protein or variant thereof.

131. The method of claim 124, wherein the napDNAbp is a nuclease active Cas9, a nuclease inactive Cas9 (dCas9), or a Cas9 nickase (nCas9).

132. The method of claim 124, wherein the napDNAbp is Cas9 nickase (nCas9).

133. The method of claim 124, wherein the napDNAbp is selected from the group consisting of: Cas9, Cas12e, Cas12d, Cas12a, Cas12b1, Cas12b2, Cas13a, Cas12c, Cas12d, Cas12e, Cas12h, Cas12i, Cas12g, Cas12f (Cas14), Cas12f1, Cas12j (CasΦ), and Argonaute, and optionally has a nickase activity.

134. The method of claim 124, wherein the domain comprising an RNA-dependent DNA polymerase activity is a reverse transcriptase.

135. A method of treating a plurality of subjects having CDKL5 deficiency disorder caused by different mutations in the CDKL5 gene comprising contacting a target DNA sequence with a prime editor comprising (i) a napDNAbp and (ii) a domain having an RNA-dependent DNA polymerase activity, and a singular pegRNA, wherein the singular pegRNA is capable of targeting the prime editor to the CDKL5 gene in any of the plurality of subjects to result in a repaired CDKL5 gene in a mutation-agnostic manner.

136. The method of claim 135, wherein the pegRNA is provided in FIG. 148.

137. The method of claim 135, wherein the pegRNA is provided in FIG. 150.

138. The method of claim 135, wherein the mutation in the CDKL5 gene comprises a 1412delA mutation.

139. The method of claim 135, wherein the one or more mutations encodes a V1721, A173D, R175S, W176G, W176R, Y177C, R178P, P180L, E181A, or L182P substitution.

140. The method of claim 135, wherein the napDNAbp has a nickase activity.

141. The method of claim 135, wherein the napDNAbp is a Cas9 protein or variant thereof.

142. The method of claim 135, wherein the napDNAbp is a nuclease active Cas9, a nuclease inactive Cas9 (dCas9), or a Cas9 nickase (nCas9).

143. The method of claim 135, wherein the napDNAbp is Cas9 nickase (nCas9).

144. The method of claim 135, wherein the napDNAbp is selected from the group consisting of: Cas9, Cas12e, Cas12d, Cas12a, Cas12b1, Cas12b2, Cas13a, Cas12c, Cas12d, Cas12e, Cas12h, Cas12i, Cas12g, Cas12f (Cas14), Cas12f1, Cas12j (CasΦ), and Argonaute, and optionally has a nickase activity.

145. The method of claim 135, wherein the domain comprising an RNA-dependent DNA polymerase activity is a reverse transcriptase.

The application's sequence listing, which the Patent Office published only in electronic form, follows.

SEQUENCE LISTING (2042 sequences)

SEQ ID NO: 1 - protein, 12 aa, Artificial Sequence
  Synthetic
FLNCCPGCCMEP

SEQ ID NO: 2 - protein, 8 aa, Artificial Sequence
  Synthetic
DYKDDDDK

SEQ ID NO: 3 - protein, 14 aa, Artificial Sequence
  Synthetic
GKPIPNPLLGLDST

SEQ ID NO: 4 - protein, 19 aa, Artificial Sequence
  Synthetic
EELLSKNYHLENEVARLKK

SEQ ID NO: 5 - protein, 9 aa, Artificial Sequence
  Synthetic
YPYDVPDYA

SEQ ID NO: 6 - protein, 10 aa, Artificial Sequence
  Synthetic
EQKLISEEDL

SEQ ID NO: 7 - protein, 4 aa, Artificial Sequence
  Synthetic
FCPF

SEQ ID NO: 8 - protein, 4 aa, Artificial Sequence
  Synthetic
SGGS

SEQ ID NO: 9 - protein, 8 aa, Artificial Sequence
  Synthetic
SGGSSGGS

SEQ ID NO: 10 - protein, 12 aa, Artificial Sequence
  Synthetic
SGGSSGGSSGGS

SEQ ID NO: 11 - protein, 33 aa, Artificial Sequence
  Synthetic
SGGSSGGSSGSETPGTSESATPESSGGSSGGSS

SEQ ID NO: 12 - protein, 5 aa, Artificial Sequence
  Synthetic
EAAAK

SEQ ID NO: 13 - protein, 10 aa, Artificial Sequence
  Synthetic
EAAAKEAAAK

SEQ ID NO: 14 - protein, 15 aa, Artificial Sequence
  Synthetic
EAAAKEAAAKEAAAK

SEQ ID NO: 15 - protein, 380 aa, Homo Sapiens
MGIQGLAKLIADVAPSAIRENDIKSYFGRKVAIDASMSIYQFLIAVRQGGDVLQNEEGETTSHLMGMFYRTIRMMENGIKPVYVFDGKPPQLKSGELAKRSERRAEAEKQLQQAQAAGAEQEVEKFTKRLVKVTKQHNDECKHLLSLMGIPYLDAPSEAEASCAALVKAGKVYAAATEDMDCLTFGSPVLMRHLTASEAKKLPIQEFHLSRILQELGLNQEQFVDLCILLGSDYCESIRGIGPKRAVDLIQKHKSIEEIVRRLDPNKYPVPENWLHKEAHQLFLEPEVLDPESVELKWSEPNEEELIKFMCGEKQFSEERIRSGVKRLSKSRQGSTQGRLDDFFKVTGSLSSAKRKEPEPKGSTKKKAKTGAAGKFKRGK

SEQ ID NO: 16 - protein, 413 aa, Artificial Sequence
  Synthetic
CLAEGTRIFDPVTGTTHRIEDVVDGRKPIHVVAAAKDGTLLARPVVSWFDQGTRDVIGLRIAGGAIVWATPDHKVLTEYGWRAAGELRKGDRVAGPGGSGNSLALSLTADQMVSALLDAEPPILYSEYDPTSPFSEASMMGLLTNLADRELVHMINWAKRVPGFVDLTLHDQAHLLECAWLEILMIGLVWRSMEHPGKLLFAPNLLLDRNQGKCVEGMVEIFDMLLATSSRFRMMNLQGEEFVCLKSIILLNSGVYTFLSSTLKSLEEKDHIHRALDKITDTLIHLMAKAGLTLQQQHQRLAQLLLILSHIRHMSNKGMEHLYSMKYKNVVPLYDLLLEMLDAHRLHAGGSGASRVQAFADALDDKFLHDMLAEELRYSVIREVLPTRRARTFDLEVEELHTLVAEGVVVHNC

SEQ ID NO: 17 - protein, 413 aa, Artificial Sequence
  Synthetic
CLAEGTRIFDPVTGTTHRIEDVVDGRKPIHVVAVAKDGTLLARPVVSWFDQGTRDVIGLRIAGGAIVWATPDHKVLTEYGWRAAGELRKGDRVAGPGGSGNSLALSLTADQMVSALLDAEPPILYSEYDPTSPFSEASMMGLLTNLADRELVHMINWAKRVPGFVDLTLHDQAHLLECAWLEILMIGLVWRSMEHPGKLLFAPNLLLDRNQGKCVEGMVEIFDMLLATSSRFRMMNLQGEEFVCLKSIILLNSGVYTFLSSTLKSLEEKDHIHRALDKITDTLIHLMAKAGLTLQQQHQRLAQLLLILSHIRHMSNKGMEHLYSMKYTNVVPLYDLLLEMLDAHRLHAGGSGASRVQAFADALDDKFLHDMLAEELRYSVIREVLPTRRARTFDLEVEELHTLVAEGVVVHNC

SEQ ID NO: 18 - protein, 413 aa, Artificial Sequence
  Synthetic
CLAEGTRIFDPVTGTTHRIEDVVDGRKPIHVVAAAKDGTLLARPVVSWFDQGTRDVIGLRIAGGATVWATPDHKVLTEYGWRAAGELRKGDRVAGPGGSGNSLALSLTADQMVSALLDAEPPIPYSEYDPTSPFSEASMMGLLTNLADRELVHMINWAKRVPGFVDLTLHDQAHLLECAWLEILMIGLVWRSMEHPGKLLFAPNLLLDRNQGKCVEGMVEIFDMLLATSSRFRMMNLQGEEFVCLKSIILLNSGVYTFLSSTLKSLEEKDHIHRALDKITDTLIHLMAKAGLTLQQQHQRLAQLLLILSHIRHMSNKGMEHLYSMKYKNVVPLYDLLLEMLDAHRLHAGGSGASRVQAFADALDDKFLHDMLAEGLRYSVIREVLPTRRARTFDLEVEELHTLVAEGVVVHNC

SEQ ID NO: 19 - protein, 413 aa, Artificial Sequence
  Synthetic
CLAEGTRIFDPVTGTTHRIEDVVDGRKPIHVVAAAKDGTLLARPVVSWFDQGTRDVIGLRIAGGATVWATPDHKVLTEYGWRAAGELRKGDRVAGPGGSGNSLALSLTADQMVSALLDAEPPILYSEYDPTSPFSEASMMGLLTNLADRELVHMINWAKRVPGFVDLTLHDQAHLLECAWLEILMIGLVWRSMEHPGKLLFAPNLLLDRNQGKCVEGMVEIFDMLLATSSRFRMMNLQGEEFVCLKSIILLNSGVYTFLSSTLKSLEEKDHIHRALDKITDTLIHLMAKAGLTLQQQHQRLAQLLLILSHIRHMSNKGMEHLYSMKYKNVVPLYDLLLEMLDAHRLHAGGSGASRVQAFADALDDKFLHDMLAEELRYSVIREVLPTRRARTFDLEVEELHTLVAEGVVVHNC

SEQ ID NO: 20 - protein, 413 aa, Artificial Sequence
  Synthetic
CLAEGTRIFDPVTGTTHRIEDVVDGRKPIHVVAAAKDGTLLARPVVSWFDQGTRDVIGLRIAGGATVWATPDHKVLTEYGWRAAGELRKGDRVAGPGGSGNSLALSLTADQMVSALLDAEPPIPYSEYDPTSPFSEASMMGLLTNLADRELVHMINWAKRVPGFVDLTLHDQAHLLECAWLEILMIGLVWRSMEHPGKLLFAPNLLLDRNQGKCVEGMVEIFDMLLATSSRFRMMNLQGEEFVCLKSIILLNSGVYTFLSSTLKSLEEKDHIHRALDKITDTLIHLMAKAGLTLQQQHQRLAQLLLILSHIRHMSNKGMEHLYSMKYKNVVPLYDLLLEMLDAHRLHAGGSGASRVQAFADALDDKFLHDMLAEELRYSVIREVLPTRRARTFDLEVEELHTLVAEGVVVHNC

SEQ ID NO: 21 - protein, 413 aa, Artificial Sequence
  Synthetic
CLAEGTRIFDPVTGTTHRIEDVVDGRKPIHVVAAAKDGTLLARPVVSWFDQGTRDVIGLRIAGGATVWATPDHKVLTEYGWRAAGELRKGDRVAGPGGSGNSLALSLTADQMVSALLDAEPPILYSEYNPTSPFSEASMMGLLTNLADRELVHMINWAKRVPGFVDLTLHDQAHLLERAWLEILMIGLVWRSMEHPGKLLFAPNLLLDRNQGKCVEGMVEIFDMLLATSSRFRMMNLQGEEFVCLKSIILLNSGVYTFLSSTLKSLEEKDHIHRALDKITDTLIHLMAKAGLTLQQQHQRLAQLLLILSHIRHMSNKGMEHLYSMKYKNVVPLYDLLLEMLDAHRLHAGGSGASRVQAFADALDDKFLHDMLAEGLRYSVIREVLPTRRARTFDLEVEELHTLVAEGVVVHNC

SEQ ID NO: 22 - protein, 413 aa, Artificial Sequence
  Synthetic
CLAEGTRIFDPVTGTTHRIEDVVDGRKPIHVVAAAKDGTLLARPVVSWFDQGTRDVIGLRIAGGAIVWATPDHKVLTEYGWRAAGELRKGDRVAGPGGSGNSLALSLTADQMVSALLDAEPPILYSEYDPTSPFSEASMMGLLTNLADRELVHMINWAKRVPGFVDLTLHDQAHLLERAWLEILMIGLVWRSMEHPGKLLFAPNLLLDRNQGKCVEGMVEIFDMLLATSSRFRMMNLQGEEFVCLKSIILLNSGVYTFLSSTLKSLEEKDHIHRALDKITDTLIHLMAKAGLTLQQQHQRLAQLLLILSHIRHMSNKGMEHLYSMKYKNVVPLYDLLLEMLDAHRLHAGGSGASRVQAFADALDDKFLHDMLAEGLRYSVIREVLPTRRARTFDLEVEELHTLVAEGVVVHNC

SEQ ID NO: 23 - protein, 413 aa, Artificial Sequence
  Synthetic
CLAEGTRIFDPVTGTTHRIEDVVDGRKPIHVVAVAKDGTLLARPVVSWFDQGTRDVIGLRIAGGATVWATPDHKVLTEYGWRAAGELRKGDRVAGPGGSGNSLALSLTADQMVSALLDAEPPILYSEYDPTSPFSEASMMGLLTNLADRELVHMINWAKRVPGFVDLTLHDQAHLLERAWLEILMIGLVWRSMEHPGKLLFAPNLLLDRNQGKCVEGMVEIFDMLLATSSRFRMMNLQGEEFVCLKSIILLNSGVYTFLSSTLKSLEEKDHIHRALDKITDTLIHLMAKAGLTLQQQHQRLAQLLLILSHIRHMSNKGMEHLYSMKYKNVVPLYDLLLEMLDAHRLHAGGSGASRVQAFADALDDKFLHDMLAEELRYSVIREVLPTRRARTFDLEVEELHTLVAEGVVVHNC

SEQ ID NO: 24 - DNA, 33 bp, Artificial Sequence
  Synthetic
gccaacatgaggatcacccatgtctgcagggcc

SEQ ID NO: 25 - protein, 131 aa, Artificial Sequence
  Synthetic
GSASNFTQFVLVDNGGTGDVTVAPSNFANGVAEWISSNSRSQAYKVTCSVRQSSAQNRKYTIKVEVPKVATQTVGGEELPVAGWRSYLNMELTIPIFATNSDCELIVKAMQGLLKDGNPIPSAIAANSGIY

SEQ ID NO: 26 - protein, 7 aa, Artificial Sequence
  Synthetic
PKKKRKV

SEQ ID NO: 27 - protein, 30 aa, Artificial Sequence
  Synthetic
MDSLLMNRRKFLYQFKNVRWAKGRRETYLC

SEQ ID NO: 28 - protein, 2117 aa, Artificial Sequence
  Synthetic
MKRTADGSEFESPKKKRKVDKKYSIGLDIGTNSVGWAVITDEYKVPSKKFKVLGNTDRHSIKKNLIGALLFDSGETAEATRLKRTARRRYTRRKNRICYLQEIFSNEMAKVDDSFFHRLEESFLVEEDKKHERHPIFGNIVDEVAYHEKYPTIYHLRKKLVDSTDKADLRLIYLALAHMIKFRGHFLIEGDLNPDNSDVDKLFIQLVQTYNQLFEENPINASGVDAKAILSARLSKSRRLENLIAQLPGEKKNGLFGNLIALSLGLTPNFKSNFDLAEDAKLQLSKDTYDDDLDNLLAQIGDQYADLFLAAKNLSDAILLSDILRVNTEITKAPLSASMIKRYDEHHQDLTLLKALVRQQLPEKYKEIFFDQSKNGYAGYIDGGASQEEFYKFIKPILEKMDGTEELLVKLNREDLLRKQRTFDNGSIPHQIHLGELHAILRRQEDFYPFLKDNREKIEKILTFRIPYYVGPLARGNSRFAWMTRKSEETITPWNFEEVVDKGASAQSFIERMTNFDKNLPNEKVLPKHSLLYEYFTVYNELTKVKYVTEGMRKPAFLSGEQKKAIVDLLFKTNRKVTVKQLKEDYFKKIECFDSVEISGVEDRFNASLGTYHDLLKIIKDKDFLDNEENEDILEDIVLTLTLFEDREMIEERLKTYAHLFDDKVMKQLKRRRYTGWGRLSRKLINGIRDKQSGKTILDFLKSDGFANRNFMQLIHDDSLTFKEDIQKAQVSGQGDSLHEHIANLAGSPAIKKGILQTVKVVDELVKVMGRHKPENIVIEMARENQTTQKGQKNSRERMKRIEEGIKELGSQILKEHPVENTQLQNEKLYLYYLQNGRDMYVDQELDINRLSDYDVDAIVPQSFLKDDSIDNKVLTRSDKNRGKSDNVPSEEVVKKMKNYWRQLLNAKLITQRKFDNLTKAERGGLSELDKAGFIKRQLVETRQITKHVAQILDSRMNTKYDENDKLIREVKVITLKSKLVSDFRKDFQFYKVREINNYHHAHDAYLNAVVGTALIKKYPKLESEFVYGDYKVYDVRKMIAKSEQEIGKATAKYFFYSNIMNFFKTEITLANGEIRKRPLIETNGETGEIVWDKGRDFATVRKVLSMPQVNIVKKTEVQTGGFSKESILPKRNSDKLIARKKDWDPKKYGGFDSPTVAYSVLVVAKVEKGKSKKLKSVKELLGITIMERSSFEKNPIDFLEAKGYKEVKKDLIIKLPKYSLFELENGRKRMLASAGELQKGNELALPSKYVNFLYLASHYEKLKGSPEDNEQKQLFVEQHKHYLDEIIEQISEFSKRVILADANLDKVLSAYNKHRDKPIREQAENIIHLFTLTNLGAPAAFKYFDTTIDRKRYTSTKEVLDATLIHQSITGLYETRIDLSQLGGDSGGSSGGSSGSETPGTSESATPESSGGSSGGSSTLNIEDEYRLHETSKEPDVSLGSTWLSDFPQAWAETGGMGLAVRQAPLIIPLKATSTPVSIKQYPMSQEARLGIKPHIQRLLDQGILVPCQSPWNTPLLPVKKPGTNDYRPVQDLREVNKRVEDIHPTVPNPYNLLSGLPPSHQWYTVLDLKDAFFCLRLHPTSQPLFAFEWRDPEMGISGQLTWTRLPQGFKNSPTLFDEALHRDLADFRIQHPDLILLQYVDDLLLAATSELDCQQGTRALLQTLGNLGYRASAKKAQICQKQVKYLGYLLKEGQRWLTEARKETVMGQPTPKTPRQLREFLGTAGFCRLWIPGFAEMAAPLYPLTKTGTLFNWGPDQQKAYQEIKQALLTAPALGLPDLTKPFELFVDEKQGYAKGVLTQKLGPWRRPVAYLSKKLDPVAAGWPPCLRMVAAIAVLTKDAGKLTMGQPLVILAPHAVEALVKQPPDRWLSNARMTHYQALLLDTDRVQFGPVVALNPATLLPLPEEGLQHNCLDILAEAHGTRPDLTDQPLPDADHTWYTDGSSLLQEGQRKAGAAVTTETEVIWAKALPAGTSAQRAELIALTQALKMAEGKKLNVYTDSRYAFATAHIHGEIYRRRGLLTSEGKEIKNKDEILALLKALFLPKRLSIIHCPGHQKGHSAEARGNRMADQAARKAAITETPDTSTLLIENSSPSGGSKRTADGSEFEPKKKRKV

SEQ ID NO: 29 - protein, 19 aa, Artificial Sequence
  Synthetic
MKRTADGSEFESPKKKRKV

SEQ ID NO: 30 - protein, 21 aa, Artificial Sequence
  Synthetic
SGGSKRTADGSEFEPKKKRKV

SEQ ID NO: 31 - protein, 1367 aa, Artificial Sequence
  Synthetic
DKKYSIGLDIGTNSVGWAVITDEYKVPSKKFKVLGNTDRHSIKKNLIGALLFDSGETAEATRLKRTARRRYTRRKNRICYLQEIFSNEMAKVDDSFFHRLEESFLVEEDKKHERHPIFGNIVDEVAYHEKYPTIYHLRKKLVDSTDKADLRLIYLALAHMIKFRGHFLIEGDLNPDNSDVDKLFIQLVQTYNQLFEENPINASGVDAKAILSARLSKSRRLENLIAQLPGEKKNGLFGNLIALSLGLTPNFKSNFDLAEDAKLQLSKDTYDDDLDNLLAQIGDQYADLFLAAKNLSDAILLSDILRVNTEITKAPLSASMIKRYDEHHQDLTLLKALVRQQLPEKYKEIFFDQSKNGYAGYIDGGASQEEFYKFIKPILEKMDGTEELLVKLNREDLLRKQRTFDNGSIPHQIHLGELHAILRRQEDFYPFLKDNREKIEKILTFRIPYYVGPLARGNSRFAWMTRKSEETITPWNFEEVVDKGASAQSFIERMTNFDKNLPNEKVLPKHSLLYEYFTVYNELTKVKYVTEGMRKPAFLSGEQKKAIVDLLFKTNRKVTVKQLKEDYFKKIECFDSVEISGVEDRFNASLGTYHDLLKIIKDKDFLDNEENEDILEDIVLTLTLFEDREMIEERLKTYAHLFDDKVMKQLKRRRYTGWGRLSRKLINGIRDKQSGKTILDFLKSDGFANRNFMQLIHDDSLTFKEDIQKAQVSGQGDSLHEHIANLAGSPAIKKGILQTVKVVDELVKVMGRHKPENIVIEMARENQTTQKGQKNSRERMKRIEEGIKELGSQILKEHPVENTQLQNEKLYLYYLQNGRDMYVDQELDINRLSDYDVDAIVPQSFLKDDSIDNKVLTRSDKNRGKSDNVPSEEVVKKMKNYWRQLLNAKLITQRKFDNLTKAERGGLSELDKAGFIKRQLVETRQITKHVAQILDSRMNTKYDENDKLIREVKVITLKSKLVSDFRKDFQFYKVREINNYHHAHDAYLNAVVGTALIKKYPKLESEFVYGDYKVYDVRKMIAKSEQEIGKATAKYFFYSNIMNFFKTEITLANGEIRKRPLIETNGETGEIVWDKGRDFATVRKVLSMPQVNIVKKTEVQTGGFSKESILPKRNSDKLIARKKDWDPKKYGGFDSPTVAYSVLVVAKVEKGKSKKLKSVKELLGITIMERSSFEKNPIDFLEAKGYKEVKKDLIIKLPKYSLFELENGRKRMLASAGELQKGNELALPSKYVNFLYLASHYEKLKGSPEDNEQKQLFVEQHKHYLDEIIEQISEFSKRVILADANLDKVLSAYNKHRDKPIREQAENIIHLFTLTNLGAPAAFKYFDTTIDRKRYTSTKEVLDATLIHQSITGLYETRIDLSQLGGD

SEQ ID NO: 32 - protein, 677 aa, Artificial Sequence
  Synthetic
TLNIEDEYRLHETSKEPDVSLGSTWLSDFPQAWAETGGMGLAVRQAPLIIPLKATSTPVSIKQYPMSQEARLGIKPHIQRLLDQGILVPCQSPWNTPLLPVKKPGTNDYRPVQDLREVNKRVEDIHPTVPNPYNLLSGLPPSHQWYTVLDLKDAFFCLRLHPTSQPLFAFEWRDPEMGISGQLTWTRLPQGFKNSPTLFDEALHRDLADFRIQHPDLILLQYVDDLLLAATSELDCQQGTRALLQTLGNLGYRASAKKAQICQKQVKYLGYLLKEGQRWLTEARKETVMGQPTPKTPRQLREFLGTAGFCRLWIPGFAEMAAPLYPLTKTGTLFNWGPDQQKAYQEIKQALLTAPALGLPDLTKPFELFVDEKQGYAKGVLTQKLGPWRRPVAYLSKKLDPVAAGWPPCLRMVAAIAVLTKDAGKLTMGQPLVILAPHAVEALVKQPPDRWLSNARMTHYQALLLDTDRVQFGPVVALNPATLLPLPEEGLQHNCLDILAEAHGTRPDLTDQPLPDADHTWYTDGSSLLQEGQRKAGAAVTTETEVIWAKALPAGTSAQRAELIALTQALKMAEGKKLNVYTDSRYAFATAHIHGEIYRRRGLLTSEGKEIKNKDEILALLKALFLPKRLSIIHCPGHQKGHSAEARGNRMADQAARKAAITETPDTSTLLIENSSP

SEQ ID NO: 33 - protein, 2117 aa, Artificial Sequence
  Synthetic
MKRTADGSEFESPKKKRKVDKKYSIGLDIGTNSVGWAVITDEYKVPSKKFKVLGNTDRHSIKKNLIGALLFDSGETAEATRLKRTARRRYTRRKNRICYLQEIFSNEMAKVDDSFFHRLEESFLVEEDKKHERHPIFGNIVDEVAYHEKYPTIYHLRKKLVDSTDKADLRLIYLALAHMIKFRGHFLIEGDLNPDNSDVDKLFIQLVQTYNQLFEENPINASGVDAKAILSARLSKSRRLENLIAQLPGEKKNGLFGNLIALSLGLTPNFKSNFDLAEDAKLQLSKDTYDDDLDNLLAQIGDQYADLFLAAKNLSDAILLSDILRVNTEITKAPLSASMIKRYDEHHQDLTLLKALVRQQLPEKYKEIFFDQSKNGYAGYIDGGASQEEFYKFIKPILEKMDGTEELLVKLNREDLLRKQRTFDNGSIPHQIHLGELHAILRRQEDFYPFLKDNREKIEKILTFRIPYYVGPLARGNSRFAWMTRKSEETITPWNFEEVVDKGASAQSFIERMTNFDKNLPNEKVLPKHSLLYEYFTVYNELTKVKYVTEGMRKPAFLSGEQKKAIVDLLFKTNRKVTVKQLKEDYFKKIECFDSVEISGVEDRFNASLGTYHDLLKIIKDKDFLDNEENEDILEDIVLTLTLFEDREMIEERLKTYAHLFDDKVMKQLKRRRYTGWGRLSRKLINGIRDKQSGKTILDFLKSDGFANRNFMQLIHDDSLTFKEDIQKAQVSGQGDSLHEHIANLAGSPAIKKGILQTVKVVDELVKVMGRHKPENIVIEMARENQTTQKGQKNSRERMKRIEEGIKELGSQILKEHPVENTQLQNEKLYLYYLQNGRDMYVDQELDINRLSDYDVDAIVPQSFLKDDSIDNKVLTRSDKNRGKSDNVPSEEVVKKMKNYWRQLLNAKLITQRKFDNLTKAERGGLSELDKAGFIKRQLVETRQITKHVAQILDSRMNTKYDENDKLIREVKVITLKSKLVSDFRKDFQFYKVREINNYHHAHDAYLNAVVGTALIKKYPKLESEFVYGDYKVYDVRKMIAKSEQEIGKATAKYFFYSNIMNFFKTEITLANGEIRKRPLIETNGETGEIVWDKGRDFATVRKVLSMPQVNIVKKTEVQTGGFSKESILPKRNSDKLIARKKDWDPKKYGGFDSPTVAYSVLVVAKVEKGKSKKLKSVKELLGITIMERSSFEKNPIDFLEAKGYKEVKKDLIIKLPKYSLFELENGRKRMLASAGELQKGNELALPSKYVNFLYLASHYEKLKGSPEDNEQKQLFVEQHKHYLDEIIEQISEFSKRVILADANLDKVLSAYNKHRDKPIREQAENIIHLFTLTNLGAPAAFKYFDTTIDRKRYTSTKEVLDATLIHQSITGLYETRIDLSQLGGDSGGSSGGSSGSETPGTSESATPESSGGSSGGSSTLNIEDEYRLHETSKEPDVSLGSTWLSDFPQAWAETGGMGLAVRQAPLIIPLKATSTPVSIKQYPMSQEARLGIKPHIQRLLDQGILVPCQSPWNTPLLPVKKPGTNDYRPVQDLREVNKRVEDIHPTVPNPYNLLSGLPPSHQWYTVLDLKDAFFCLRLHPTSQPLFAFEWRDPEMGISGQLTWTRLPQGFKNSPTLFNEALHRDLADFRIQHPDLILLQYVDDLLLAATSELDCQQGTRALLQTLGNLGYRASAKKAQICQKQVKYLGYLLKEGQRWLTEARKETVMGQPTPKTPRQLREFLGKAGFCRLFIPGFAEMAAPLYPLTKPGTLFNWGPDQQKAYQEIKQALLTAPALGLPDLTKPFELFVDEKQGYAKGVLTQKLGPWRRPVAYLSKKLDPVAAGWPPCLRMVAAIAVLTKDAGKLTMGQPLVILAPHAVEALVKQPPDRWLSNARMTHYQALLLDTDRVQFGPVVALNPATLLPLPEEGLQHNCLDILAEAHGTRPDLTDQPLPDADHTWYTDGSSLLQEGQRKAGAAVTTETEVIWAKALPAGTSAQRAELIALTQALKMAEGKKLNVYTDSRYAFATAHIHGEIYRRRGWLTSEGKEIKNKDEILALLKALFLPKRLSIIHCPGHQKGHSAEARGNRMADQAARKAAITETPDTSTLLIENSSPSGGSKRTADGSEFEPKKKRKV

SEQ ID NO: 34 - protein, 677 aa, Artificial Sequence
  Synthetic
TLNIEDEYRLHETSKEPDVSLGSTWLSDFPQAWAETGGMGLAVRQAPLIIPLKATSTPVSIKQYPMSQEARLGIKPHIQRLLDQGILVPCQSPWNTPLLPVKKPGTNDYRPVQDLREVNKRVEDIHPTVPNPYNLLSGLPPSHQWYTVLDLKDAFFCLRLHPTSQPLFAFEWRDPEMGISGQLTWTRLPQGFKNSPTLFNEALHRDLADFRIQHPDLILLQYVDDLLLAATSELDCQQGTRALLQTLGNLGYRASAKKAQICQKQVKYLGYLLKEGQRWLTEARKETVMGQPTPKTPRQLREFLGKAGFCRLFIPGFAEMAAPLYPLTKPGTLFNWGPDQQKAYQEIKQALLTAPALGLPDLTKPFELFVDEKQGYAKGVLTQKLGPWRRPVAYLSKKLDPVAAGWPPCLRMVAAIAVLTKDAGKLTMGQPLVILAPHAVEALVKQPPDRWLSNARMTHYQALLLDTDRVQFGPVVALNPATLLPLPEEGLQHNCLDILAEAHGTRPDLTDQPLPDADHTWYTDGSSLLQEGQRKAGAAVTTETEVIWAKALPAGTSAQRAELIALTQALKMAEGKKLNVYTDSRYAFATAHIHGEIYRRRGWLTSEGKEIKNKDEILALLKALFLPKRLSIIHCPGHQKGHSAEARGNRMADQAARKAAITETPDTSTLLIENSSP

SEQ ID NO: 35 - protein, 1943 aa, Artificial Sequence
  Synthetic
MKRTADGSEFESPKKKRKVDKKYSIGLDIGTNSVGWAVITDEYKVPSKKFKVLGNTDRHSIKKNLIGALLFDSGETAEATRLKRTARRRYTRRKNRICYLQEIFSNEMAKVDDSFFHRLEESFLVEEDKKHERHPIFGNIVDEVAYHEKYPTIYHLRKKLVDSTDKADLRLIYLALAHMIKFRGHFLIEGDLNPDNSDVDKLFIQLVQTYNQLFEENPINASGVDAKAILSARLSKSRRLENLIAQLPGEKKNGLFGNLIALSLGLTPNFKSNFDLAEDAKLQLSKDTYDDDLDNLLAQIGDQYADLFLAAKNLSDAILLSDILRVNTEITKAPLSASMIKRYDEHHQDLTLLKALVRQQLPEKYKEIFFDQSKNGYAGYIDGGASQEEFYKFIKPILEKMDGTEELLVKLNREDLLRKQRTFDNGSIPHQIHLGELHAILRRQEDFYPFLKDNREKIEKILTFRIPYYVGPLARGNSRFAWMTRKSEETITPWNFEEVVDKGASAQSFIERMTNFDKNLPNEKVLPKHSLLYEYFTVYNELTKVKYVTEGMRKPAFLSGEQKKAIVDLLFKTNRKVTVKQLKEDYFKKIECFDSVEISGVEDRFNASLGTYHDLLKIIKDKDFLDNEENEDILEDIVLTLTLFEDREMIEERLKTYAHLFDDKVMKQLKRRRYTGWGRLSRKLINGIRDKQSGKTILDFLKSDGFANRNFMQLIHDDSLTFKEDIQKAQVSGQGDSLHEHIANLAGSPAIKKGILQTVKVVDELVKVMGRHKPENIVIEMARENQTTQKGQKNSRERMKRIEEGIKELGSQILKEHPVENTQLQNEKLYLYYLQNGRDMYVDQELDINRLSDYDVDAIVPQSFLKDDSIDNKVLTRSDKNRGKSDNVPSEEVVKKMKNYWRQLLNAKLITQRKFDNLTKAERGGLSELDKAGFIKRQLVETRQITKHVAQILDSRMNTKYDENDKLIREVKVITLKSKLVSDFRKDFQFYKVREINNYHHAHDAYLNAVVGTALIKKYPKLESEFVYGDYKVYDVRKMIAKSEQEIGKATAKYFFYSNIMNFFKTEITLANGEIRKRPLIETNGETGEIVWDKGRDFATVRKVLSMPQVNIVKKTEVQTGGFSKESILPKRNSDKLIARKKDWDPKKYGGFDSPTVAYSVLVVAKVEKGKSKKLKSVKELLGITIMERSSFEKNPIDFLEAKGYKEVKKDLIIKLPKYSLFELENGRKRMLASAGELQKGNELALPSKYVNFLYLASHYEKLKGSPEDNEQKQLFVEQHKHYLDEIIEQISEFSKRVILADANLDKVLSAYNKHRDKPIREQAENIIHLFTLTNLGAPAAFKYFDTTIDRKRYTSTKEVLDATLIHQSITGLYETRIDLSQLGGDSGGSSGGSSGSETPGTSESATPESSGGSSGGSSTLNIEDEYRLHETSKEPDVSLGSTWLSDFPQAWAETGGMGLAVRQAPLIIPLKATSTPVSIKQYPMSQEARLGIKPHIQRLLDQGILVPCQSPWNTPLLPVKKPGTNDYRPVQDLREVNKRVEDIHPTVPNPYNLLSGLPPSHQWYTVLDLKDAFFCLRLHPTSQPLFAFEWRDPEMGISGQLTWTRLPQGFKNSPTLFNEALHRDLADFRIQHPDLILLQYVDDLLLAATSELDCQQGTRALLQTLGNLGYRASAKKAQICQKQVKYLGYLLKEGQRWLTEARKETVMGQPTPKTPRQLREFLGKAGFCRLFIPGFAEMAAPLYPLTKPGTLFNWGPDQQKAYQEIKQALLTAPALGLPDLTKPFELFVDEKQGYAKGVLTQKLGPWRRPVAYLSKKLDPVAAGWPPCLRMVAAIAVLTKDAGKLTMGQPLVILAPHAVEALVKQPPDRWLSNARMTHYQALLLDTDRVQFGPVVALNPATLLPLPEEGLQHNCLDNSRLINSGGSKRTADGSEFEPKKKRKV

SEQ ID NO: 36 - protein, 503 aa, Artificial Sequence
  Synthetic
TLNIEDEYRLHETSKEPDVSLGSTWLSDFPQAWAETGGMGLAVRQAPLIIPLKATSTPVSIKQYPMSQEARLGIKPHIQRLLDQGILVPCQSPWNTPLLPVKKPGTNDYRPVQDLREVNKRVEDIHPTVPNPYNLLSGLPPSHQWYTVLDLKDAFFCLRLHPTSQPLFAFEWRDPEMGISGQLTWTRLPQGFKNSPTLFNEALHRDLADFRIQHPDLILLQYVDDLLLAATSELDCQQGTRALLQTLGNLGYRASAKKAQICQKQVKYLGYLLKEGQRWLTEARKETVMGQPTPKTPRQLREFLGKAGFCRLFIPGFAEMAAPLYPLTKPGTLFNWGPDQQKAYQEIKQALLTAPALGLPDLTKPFELFVDEKQGYAKGVLTQKLGPWRRPVAYLSKKLDPVAAGWPPCLRMVAAIAVLTKDAGKLTMGQPLVILAPHAVEALVKQPPDRWLSNARMTHYQALLLDTDRVQFGPVVALNPATLLPLPEEGLQHNCLDNSRLIN

SEQ ID NO: 37 - protein, 1368 aa, Streptococcus pyogenes [sequence omitted]

SEQ ID NO: 38 - protein, 4104 aa, Streptococcus pyogenes
ATGGATAAAAAATATAGCATTGGCCTGGATATTGGCACCAACAGCGTGGGCTGGGCGGTGATTACCGATGAATATAAAGTGCCGAGCAAAAAATTTAAAGTGCTGGGCAACACCGATCGCCATAGCATTAAAAAAAACCTGATTGGCGCGCTGCTGTTTGATAGCGGCGAAACCGCGGAAGCGACCCGCCTGAAACGCACCGCGCGCCGCCGCTATACCCGCCGCAAAAACCGCATTTGCTATCTGCAGGAAATTTTTAGCAACGAAATGGCGAAAGTGGATGATAGCTTTTTTCATCGCCTGGAAGAAAGCTTTCTGGTGGAAGAAGATAAAAAACATGAACGCCATCCGATTTTTGGCAACATTGTGGATGAAGTGGCGTATCATGAAAAATATCCGACCATTTATCATCTGCGCAAAAAACTGGTGGATAGCACCGATAAAGCGGATCTGCGCCTGATTTATCTGGCGCTGGCGCATATGATTAAATTTCGCGGCCATTTTCTGATTGAAGGCGATCTGAACCCGGATAACAGCGATGTGGATAAACTGTTTATTCAGCTGGTGCAGACCTATAACCAGCTGTTTGAAGAAAACCCGATTAACGCGAGCGGCGTGGATGCGAAAGCGATTCTGAGCGCGCGCCTGAGCAAAAGCCGCCGCCTGGAAAACCTGATTGCGCAGCTGCCGGGCGAAAAAAAAAACGGCCTGTTTGGCAACCTGATTGCGCTGAGCCTGGGCCTGACCCCGAACTTTAAAAGCAACTTTGATCTGGCGGAAGATGCGAAACTGCAGCTGAGCAAAGATACCTATGATGATGATCTGGATAACCTGCTGGCGCAGATTGGCGATCAGTATGCGGATCTGTTTCTGGCGGCGAAAAACCTGAGCGATGCGATTCTGCTGAGCGATATTCTGCGCGTGAACACCGAAATTACCAAAGCGCCGCTGAGCGCGAGCATGATTAAACGCTATGATGAACATCATCAGGATCTGACCCTGCTGAAAGCGCTGGTGCGCCAGCAGCTGCCGGAAAAATATAAAGAAATTTTTTTTGATCAGAGCAAAAACGGCTATGCGGGCTATATTGATGGCGGCGCGAGCCAGGAAGAATTTTATAAATTTATTAAACCGATTCTGGAAAAAATGGATGGCACCGAAGAACTGCTGGTGAAACTGAACCGCGAAGATCTGCTGCGCAAACAGCGCACCTTTGATAACGGCAGCATTCCGCATCAGATTCATCTGGGCGAACTGCATGCGATTCTGCGCCGCCAGGAAGATTTTTATCCGTTTCTGAAAGATAACCGCGAAAAAATTGAAAAAATTCTGACCTTTCGCATTCCGTATTATGTGGGCCCGCTGGCGCGCGGCAACAGCCGCTTTGCGTGGATGACCCGCAAAAGCGAAGAAACCATTACCCCGTGGAACTTTGAAGAAGTGGTGGATAAAGGCGCGAGCGCGCAGAGCTTTATTGAACGCATGACCAACTTTGATAAAAACCTGCCGAACGAAAAAGTGCTGCCGAAACATAGCCTGCTGTATGAATATTTTACCGTGTATAACGAACTGACCAAAGTGAAATATGTGACCGAAGGCATGCGCAAACCGGCGTTTCTGAGCGGCGAACAGAAAAAAGCGATTGTGGATCTGCTGTTTAAAACCAACCGCAAAGTGACCGTGAAACAGCTGAAAGAAGATTATTTTAAAAAAATTGAATGCTTTGATAGCGTGGAAATTAGCGGCGTGGAAGATCGCTTTAACGCGAGCCTGGGCACCTATCATGATCTGCTGAAAATTATTAAAGATAAAGATTTTCTGGATAACGAAGAAAACGAAGATATTCTGGAAGATATTGTGCTGACCCTGACCCTGTTTGAAGATCGCGAAATGATTGAAGAACGCCTGAAAACCTATGCGCATCTGTTTGATGATAAAGTGATGAAACAGCTGAAACGCCGCCGCTATACCGGCTGGGGCCGCCTGAGCCGCAAACTGATTAACGGCATTCGCGATAAACAGAGCGGCAAAACCATTCTGGATTTTCTGAAAAGCGATGGCTTTGCGAACCGCAACTTTATGCAGCTGATTCATGATGATAGCCTGACCTTTAAAGAAGATATTCAGAAAGCGCAGGTGAGCGGCCAGGGCGATAGCCTGCATGAACATATTGCGAACCTGGCGGGCAGCCCGGCGATTAAAAAAGGCATTCTGCAGACCGTGAAAGTGGTGGATGAACTGGTGAAAGTGATGGGCCGCCATAAACCGGAAAACATTGTGATTGAAATGGCGCGCGAAAACCAGACCACCCAGAAAGGCCAGAAAAACAGCCGCGAACGCATGAAACGCATTGAAGAAGGCATTAAAGAACTGGGCAGCCAGATTCTGAAAGAACATCCGGTGGAAAACACCCAGCTGCAGAACGAAAAACTGTATCTGTATTATCTGCAGAACGGCCGCGATATGTATGTGGATCAGGAACTGGATATTAACCGCCTGAGCGATTATGATGTGGATCATATTGTGCCGCAGAGCTTTCTGAAAGATGATAGCATTGATAACAAAGTGCTGACCCGCAGCGATAAAAACCGCGGCAAAAGCGATAACGTGCCGAGCGAAGAAGTGGTGAAAAAAATGAAAAACTATTGGCGCCAGCTGCTGAACGCGAAACTGATTACCCAGCGCAAATTTGATAACCTGACCAAAGCGGAACGCGGCGGCCTGAGCGAACTGGATAAAGCGGGCTTTATTAAACGCCAGCTGGTGGAAACCCGCCAGATTACCAAACATGTGGCGCAGATTCTGGATAGCCGCATGAACACCAAATATGATGAAAACGATAAACTGATTCGCGAAGTGAAAGTGATTACCCTGAAAAGCAAACTGGTGAGCGATTTTCGCAAAGATTTTCAGTTTTATAAAGTGCGCGAAATTAACAACTATCATCATGCGCATGATGCGTATCTGAACGCGGTGGTGGGCACCGCGCTGATTAAAAAATATCCGAAACTGGAAAGCGAATTTGTGTATGGCGATTATAAAGTGTATGATGTGCGCAAAATGATTGCGAAAAGCGAACAGGAAATTGGCAAAGCGACCGCGAAATATTTTTTTTATAGCAACATTATGAACTTTTTTAAAACCGAAATTACCCTGGCGAACGGCGAAATTCGCAAACGCCCGCTGATTGAAACCAACGGCGAAACCGGCGAAATTGTGTGGGATAAAGGCCGCGATTTTGCGACCGTGCGCAAAGTGCTGAGCATGCCGCAGGTGAACATTGTGAAAAAAACCGAAGTGCAGACCGGCGGCTTTAGCAAAGAAAGCATTCTGCCGAAACGCAACAGCGATAAACTGATTGCGCGCAAAAAAGATTGGGATCCGAAAAAATATGGCGGCTTTGATAGCCCGACCGTGGCGTATAGCGTGCTGGTGGTGGCGAAAGTGGAAAAAGGCAAAAGCAAAAAACTGAAAAGCGTGAAAGAACTGCTGGGCATTACCATTATGGAACGCAGCAGCTTTGAAAAAAACCCGATTGATTTTCTGGAAGCGAAAGGCTATAAAGAAGTGAAAAAAGATCTGATTATTAAACTGCCGAAATATAGCCTGTTTGAACTGGAAAACGGCCGCAAACGCATGCTGGCGAGCGCGGGCGAACTGCAGAAAGGCAACGAACTGGCGCTGCCGAGCAAATATGTGAACTTTCTGTATCTGGCGAGCCATTATGAAAAACTGAAAGGCAGCCCGGAAGATAACGAACAGAAACAGCTGTTTGTGGAACAGCATAAACATTATCTGGATGAAATTATTGAACAGATTAGCGAATTTAGCAAACGCGTGATTCTGGCGGATGCGAACCTGGATAAAGTGCTGAGCGCGTATAACAAACATCGCGATAAACCGATTCGCGAACAGGCGGAAAACATTATTCATCTGTTTACCCTGACCAACCTGGGCGCGCCGGCGGCGTTTAAATATTTTGATACCACCATTGATCGCAAACGCTATACCAGCACCAAAGAAGTGCTGGATGCGACCCTGATTCATCAGAGCATTACCGGCCTGTATGAAACCCGCATTGATCTGAGCCAGCTGGGCGGCGAT

SEQ ID NO: 39 - DNA, 4104 bp, Streptococcus pyogenes
atggataagaaatactcaataggcttagatatcggcacaaatagcgtcggatgggcggtgatcactgatgattataaggttccgtctaaaaagttcaaggttctgggaaatacagaccgccacagtatcaaaaaaaatcttataggggctcttttatttggcagtggagagacagcggaagcgactcgtctcaaacggacagctcgtagaaggtatacacgtcggaagaatcgtatttgttatctacaggagattttttcaaatgagatggcgaaagtagatgatagtttctttcatcgacttgaagagtcttttttggtggaagaagacaagaagcatgaacgtcatcctatttttggaaatatagtagatgaagttgcttatcatgagaaatatccaactatctatcatctgcgaaaaaaattggcagattctactgataaagcggatttgcgcttaatctatttggccttagcgcatatgattaagtttcgtggtcattttttgattgagggagatttaaatcctgataatagtgatgtggacaaactatttatccagttggtacaaatctacaatcaattatttgaagaaaaccctattaacgcaagtagagtagatgctaaagcgattctttctgcacgattgagtaaatcaagacgattagaaaatctcattgctcagctccccggtgagaagagaaatggcttgtttgggaatctcattgctttgtcattgggattgacccctaattttaaatcaaattttgatttggcagaagatgctaaattacagctttcaaaagatacttacgatgatgatttagataatttattggcgcaaattggagatcaatatgctgatttgtttttggcagctaagaatttatcagatgctattttactttcagatatcctaagagtaaatagtgaaataactaaggctcccctatcagcttcaatgattaagcgctacgatgaacatcatcaagacttgactcttttaaaagctttagttcgacaacaacttccagaaaagtataaagaaatcttttttgatcaatcaaaaaacggatatgcaggttatattgatgggggagctagccaagaagaattttataaatttatcaaaccaattttagaaaaaatggatggtactgaggaattattggtgaaactaaatcgtgaagatttgctgcgcaagcaacggacctttgacaacggctctattccccatcaaattcacttgggtgagctgcatgctattttgagaagacaagaagacttttatccatttttaaaagacaatcgtgagaagattgaaaaaatcttgacttttcgaattccttattatgttggtccattggcgcgtggcaatagtcgttttgcatggatgactcggaagtctgaagaaacaattaccccatggaattttgaagaagttgtcgataaaggtgcttcagctcaatcatttattgaacgcatgacaaactttgataaaaatcttccaaatgaaaaagtactaccaaaacatagtttgctttatgagtattttacggtttataacgaattgacaaaggtcaaatatgttactgagggaatgcgaaaaccagcatttctttcaggtgaacagaagaaagccattgttgatttactcttcaaaacaaatcgaaaagtaaccgttaagcaattaaaagaagattatttcaaaaaaatagaatgttttgatagtgttgaaatttcaggagttgaagatagatttaatgcttcattaggcgcctaccatgatttgctaaaaattattaaagataaagattttttggataatgaagaaaatgaagatatcttagaggatattgttttaacattgaccttatttgaagatagggggatgattgaggaaagacttaaaacatatgctcacctctttgatgataaggtgatgaaacagcttaaacgtcgccgttatactggttggggacgtttgtctcgaaaattgattaatggtattagggataagcaatctggcaaaacaatattagattttttgaaatcagatggttttgccaatcgcaattttatgcagctgatccatgatgatagtttgacatttaaagaagatattcaaaaagcacaggtgtctggacaaggccatagtttacatgaacagattgctaacttagctggcagtcctgctattaaaaaaggtattttacagactgtaaaaattgttgatgaactggtcaaagtaatggggcataagccagaaaatatcgttattgaaatggcacgtgaaaatcagacaactcaaaagggccagaaaaattcgcgagagcgtatgaaacgaatcgaagaaggtatcaaagaattaggaagtcagattcttaaagagcatcctgttgaaaatactcaattgcaaaatgaaaagctctatctctattatctacaaaatggaagagacatgtatgtggaccaagaattagatattaatcgtttaagtgattatgatgtcgatcacattgttccacaaagtttcattaaagacgattcaatagacaataaggtactaacgcgttctgataaaaatcgtggtaaatcggataacgttccaagtgaagaagtagtcaaaaagatgaaaaactattggagacaacttctaaacgccaagttaatcactcaacgtaagtttgataatttaacgaaagctgaacgtggaggtttgagtgaacttgataaagctggttttatcaaacgccaattggttgaaactcgccaaatcactaagcatgtggcacaaattttggatagtcgcatgaatactaaatacgatgaaaatgataaacttattcgagaggttaaagtgattaccttaaaatctaaattagtttctgacttccgaaaagatttccaattctataaagtacgtgagattaacaattaccatcatgcccatgatgcgtatctaaatgccgtcgttggaactgctttgattaagaaatatccaaaacttgaatcggagtttgtctatggtgattataaagtttatgatgttcgtaaaatgattgctaagtctgagcaagaaataggcaaagcaaccgcaaaatatttcttttactctaatatcatgaacttcttcaaaacagaaattacacttgcaaatggagagattcgcaaacgccctctaatcgaaactaatggggaaactggagaaattgtctgggataaagggcgagattttgccacagtgcgcaaagtattgtccatgccccaagtcaatattgtcaagaaaacagaagtacagacaggcggattctccaaggagtcaattttaccaaaaagaaattcggacaagcttattgctcgtaaaaaagactgggatccaaaaaaatatggtggttttgatagtccaacggtagcttattcagtcctagtggttgctaaggtggaaaaagggaaatcgaagaagttaaaatccgttaaagagttactagggatcacaattatggaaagaagttcctttgaaaaaaatccgattgactttttagaagctaaaggatataaggaagttaaaaaagacttaatcattaaactacctaaatatagtctttttgagttagaaaacggtcgtaaacggatgctggctagtgccggagaattacaaaaaggaaatgagctggctctgccaagcaaatatgtgaattttttatatttagctagtcattatgaaaagttgaagggtagtccagaagataacgaacaaaaacaattgtttgtggagcagcataagcattatttagatgagattattgagcaaatcagtgaattttctaagcgtgttattttagcagatgccaatttagataaagttcttagtgcatataacaaacatagagacaaaccaatacgtgaacaagcagaaaatattattcatttatttacgttgacgaatcttggagctcccgctgcttttaaatattttgatacaacaattgatcgtaaacgatatacgtctacaaaagaagttttagatgccactcttatccatcaatccatcactggtctttatgaaacacgcattgatttgagtcagctaggaggtgactga

SEQ ID NO: 40 - protein, 1367 aa, Streptococcus pyogenes
MDKKYSIGLDIGTNSVGWAVITDDYKVPSKKFKVLGNTDRHSIKKNLIGALLFGSGETAEATRLKRTARRRYTRRKNRICYLQEIFSNEMAKVDDSFFHRLEESFLVEEDKKHERHPIFGNIVDEVAYHEKYPTIYHLRKKLADSTDKADLRLIYLALAHMIKFRGHFLIEGDLNPDNSDVDKLFIQLVQIYNQLFEENPINASRVDAKAILSARLSKSRRLENLIAQLPGEKRNGLFGNLIALSLGLTPNFKSNFDLAEDAKLQLSKDTYDDDLDNLLAQIGDQYADLFLAAKNLSDAILLSDILRVNSEITKAPLSASMIKRYDEHHQDLTLLKALVRQQLPEKYKEIFFDQSKNGYAGYIDGGASQEEFYKFIKPILEKMDGTEELLVKLNREDLLRKQRTFDNGSIPHQIHLGELHAILRRQEDFYPFLKDNREKIEKILTFRIPYYVGPLARGNSRFAWMTRKSEETITPWNFEEVVDKGASAQSFIERMTNFDKNLPNEKVLPKHSLLYEYFTVYNELTKVKYVTEGMRKPAFLSGEQKKAIVDLLFKTNRKVTVKQLKEDYFKKIECFDSVEISGVEDRFNASLGAYHDLLKIIKDKDFLDNEENEDILEDIVLTLTLFEDRGMIEERLKTYAHLFDDKVMKQLKRRRYTGWGRLSRKLINGIRDKQSGKTILDFLKSDGFANRNFMQLIHDDSLTFKEDIQKAQVSGQGHSLHEQIANLAGSPAIKKGILQTVKIVDELVKVMGHKPENIVIEMARENQTTQKGQKNSRERMKRIEEGIKELGSQILKEHPVENTQLQNEKLYLYYLQNGRDMYVDQELDINRLSDYDVDHIVPQSFIKDDSIDNKVLTRSDKNRGKSDNVPSEEVVKKMKNYWRQLLNAKLITQRKFDNLTKAERGGLSELDKAGFIKRQLVETRQITKHVAQILDSRMNTKYDENDKLIREVKVITLKSKLVSDFRKDFQFYKVREINNYHHAHDAYLNAVVGTALIKKYPKLESEFVYGDYKVYDVRKMIAKSEQEIGKATAKYFFYSNIMNFFKTEITLANGEIRKRPLIETNGETGEIVWDKGRDFATVRKVLSMPQVNIVKKTEVQTGGFSKESILPKRNSDKLIARKKDWDPKKYGGFDSPTVAYSVLVVAKVEKGKSKKLKSVKELLGITIMERSSFEKNPIDFLEAKGYKEVKKDLIIKLPKYSLFELENGRKRMLASAGELQKGNELALPSKYVNFLYLASHYEKLKGSPEDNEQKQLFVEQHKHYLDEIIEQISEFSKRVILADANLDKVLSAYNKHRDKPIREQAENIIHLFTLTNLGAPAAFKYFDTTIDRKRYTSTKEVLDATLIHQSITGLYETRIDLSQLGGD

SEQ ID NO: 41 - DNA, 4212 bp, Streptococcus pyogenes
atggataaaaagtattctattggtttagacatcggcactaattccgttggatgggctgtcataaccgatgaatacaaagtaccttcaaagaaatttaaggtgttggggaacacagaccgtcattcgattaaaaagaatcttatcggtgccctcctattcgatagtggcgaaacggcagaggcgactcgcctgaaacgaaccgctcggagaaggtatacacgtcgcaagaaccgaatatgttacttacaagaaatttttagcaatgagatggccaaagttgacgattctttctttcaccgtttggaagagtccttccttgtcgaagaggacaagaaacatgaacggcaccccatctttggaaacatagtagatgaggtggcatatcatgaaaagtacccaacgatttatcacctcagaaaaaagctagttgactcaactgataaagcggacctgaggttaatctacttggctcttgcccatatgataaagttccgtgggcactttctcattgagggtgatctaaatccggacaactcggatgtcgacaaactgttcatccagttagtacaaacctataatcagttgtttgaagagaaccctataaatgcaagtggcgtggatgcgaaggctattcttagcgcccgcctctctaaatcccgacggctagaaaacctgatcgcacaattacccggagagaagaaaaatgggttgttcggtaaccttatagcgctctcactaggcctgacaccaaattttaagtcgaacttcgacttagctgaagatgccaaattgcagcttagtaaggacacgtacgatgacgatctcgacaatctactggcacaaattggagatcagtatgcggacttatttttggctgccaaaaaccttagcgatgcaatcctcctatctgacatactgagagttaatactgagattaccaaggcgccgttatccgcttcaatgatcaaaaggtacgatgaacatcaccaagacttgacacttctcaaggccctagtccgtcagcaactgcctgagaaatataaggaaatattctttgatcagtcgaaaaacgggtacgcaggttatattgacggcggagcgagtcaagaggaattctacaagtttatcaaacccatattagagaagatggatgggacggaagagttgcttgtaaaactcaatcgcgaagatctactgcgaaagcagcggactttcgacaacggtagcattccacatcaaatccacttaggcgaattgcatgctatacttagaaggcaggaggatttttatccgttcctcaaagacaatcgtgaaaagattgagaaaatcctaacctttcgcataccttactatgtgggacccctggcccgagggaactctcggttcgcatggatgacaagaaagtccgaagaaacgattactccatggaattttgaggaagttgtcgataaaggtgcgtcagctcaatcgttcatcgagaggatgaccaactttgacaagaatttaccgaacgaaaaagtattgcctaagcacagtttactttacgagtatttcacagtgtacaatgaactcacgaaagttaagtatgtcactgagggcatgcgtaaacccgcctttctaagcggagaacagaagaaagcaatagtagatctgttattcaagaccaaccgcaaagtgacagttaagcaattgaaagaggactactttaagaaaattgaatgcttcgattctgtcgagatctccggggtagaagatcgatttaatgcgtcacttggtacgtatcatgacctcctaaagataattaaagataaggacttcctggataacgaagagaatgaagatatcttagaagatatagtgttgactcttaccctctttgaagatcgggaaatgattgaggaaagactaaaaacatacgctcacctgttcgacgataaggttatgaaacagttaaagaggcgtcgctatacgggctggggacgattgtcgcggaaacttatcaacgggataagagacaagcaaagtggtaaaactattctcgattttctaaagagcgacggcttcgccaataggaactttatgcagctgatccatgatgactctttaaccttcaaagaggatatacaaaaggcacaggtttccggacaaggggactcattgcacgaacatattgcgaatcttgctggttcgccagccatcaaaaagggcatactccagacagtcaaagtagtggatgagctagttaaggtcatgggacgtcacaaaccggaaaacattgtaatcgagatggcacgcgaaaatcaaacgactcagaaggggcaaaaaaacagtcgagagcggatgaagagaatagaagagggtattaaagaactgggcagccagatcttaaaggagcatcctgtggaaaatacccaattgcagaacgagaaactttacctctattacctacaaaatggaagggacatgtatgttgatcaggaactggacataaaccgtttatctgattacgacgtcgatcacattgtaccccaatcctttttgaaggacgattcaatcgacaataaagtgcttacacgctcggataagaaccgagggaaaagtgacaatgttccaagcgaggaagtcgtaaagaaaatgaagaactattggcggcagctcctaaatgcgaaactgataacgcaaagaaagttcgataacttaactaaagctgagaggggtggcttgtctgaacttgacaaggccggatttattaaacgtcagctcgtggaaacccgccaaatcacaaagcatgttgcacagatactagattcccgaatgaatacgaaatacgacgagaacgataagctgattcgggaagtcaaagtaatcactttaaagtcaaaattggtgtcggacttcagaaaggattttcaattctataaagttagggagataaataactaccaccatgcgcacgacgcttatcttaatgccgtcgtagggaccgcactcattaagaaatacccgaagctagaaagtgagtttgtgtatggtgattacaaagtttatgacgtccgtaagatgatcgcgaaaagcgaacaggagataggcaaggctacagccaaatacttcttttattctaacattatgaatttctttaagacggaaatcactctggcaaacggagagatacgcaaacgacctttaattgaaaccaatggggagacaggtgaaatcgtatgggataagggccgggacttcgcgacggtgagaaaagttttgtccatgccccaagtcaacatagtaaagaaaactgaggtgcagaccggagggttttcaaaggaatcgattcttccaaaaaggaatagtgataagctcatcgctcgtaaaaaggactgggacccgaaaaagtacggtggcttcgatagccctacagttgcctattctgtcctagtagtggcaaaagttgagaagggaaaatccaagaaactgaagtcagtcaaagaattattggggataacgattatggagcgctcgtcttttgaaaagaaccccatcgacttccttgaggcgaaaggttacaaggaagtaaaaaaggatctcataattaaactaccaaagtatagtctgtttgagttagaaaatggccgaaaacggatgttggctagcgccggagagcttcaaaaggggaacgaactcgcactaccgtctaaatacgtgaatttcctgtatttagcgtcccattacgagaagttgaaaggttcacctgaagataacgaacagaagcaactttttgttgagcagcacaaacattatctcgacgaaatcatagagcaaatttcggaattcagtaagagagtcatcctagctgatgccaatctggacaaagtattaagcgcatacaacaagcacagggataaacccatacgtgagcaggcggaaaatattatccatttgtttactcttaccaacctcggcgctccagccgcattcaagtattttgacacaacgatagatcgcaaacgatacacttctaccaaggaggtgctagacgcgacactgattcaccaatccatcacgggattatatgaaactcggatagatttgtcacagcttgggggtgacggatcccccaagaagaagaggaaagtctcgagcgactacaaagaccatgacggtgattataaagatcatgacatcgattacaaggatgacgatgacaaggctgcagga

SEQ ID NO: 42 - protein, 1404 aa, Streptococcus pyogenes
MDKKYSIGLDIGTNSVGWAVITDEYKVPSKKFKVLGNTDRHSIKKNLIGALLFDSGETAEATRLKRTARRRYTRRKNRICYLQEIFSNEMAKVDDSFFHRLEESFLVEEDKKHERHPIFGNIVDEVAYHEKYPTIYHLRKKLVDSTDKADLRLIYLALAHMIKFRGHFLIEGDLNPDNSDVDKLFIQLVQTYNQLFEENPINASGVDAKAILSARLSKSRRLENLIAQLPGEKKNGLFGNLIALSLGLTPNFKSNFDLAEDAKLQLSKDTYDDDLDNLLAQIGDQYADLFLAAKNLSDAILLSDILRVNTEITKAPLSASMIKRYDEHHQDLTLLKALVRQQLPEKYKEIFFDQSKNGYAGYIDGGASQEEFYKFIKPILEKMDGTEELLVKLNREDLLRKQRTFDNGSIPHQIHLGELHAILRRQEDFYPFLKDNREKIEKILTFRIPYYVGPLARGNSRFAWMTRKSEETITPWNFEEVVDKGASAQSFIERMTNFDKNLPNEKVLPKHSLLYEYFTVYNELTKVKYVTEGMRKPAFLSGEQKKAIVDLLFKTNRKVTVKQLKEDYFKKIECFDSVEISGVEDRFNASLGTYHDLLKIIKDKDFLDNEENEDILEDIVLTLTLFEDREMIEERLKTYAHLFDDKVMKQLKRRRYTGWGRLSRKLINGIRDKQSGKTILDFLKSDGFANRNFMQLIHDDSLTFKEDIQKAQVSGQGDSLHEHIANLAGSPAIKKGILQTVKVVDELVKVMGRHKPENIVIEMARENQTTQKGQKNSRERMKRIEEGIKELGSQILKEHPVENTQLQNEKLYLYYLQNGRDMYVDQELDINRLSDYDVDHIVPQSFLKDDSIDNKVLTRSDKNRGKSDNVPSEEVVKKMKNYWRQLLNAKLITQRKFDNLTKAERGGLSELDKAGFIKRQLVETRQITKHVAQILDSRMNTKYDENDKLIREVKVITLKSKLVSDFRKDFQFYKVREINNYHHAHDAYLNAVVGTALIKKYPKLESEFVYGDYKVYDVRKMIAKSEQEIGKATAKYFFYSNIMNFFKTEITLANGEIRKRPLIETNGETGEIVWDKGRDFATVRKVLSMPQVNIVKKTEVQTGGFSKESILPKRNSDKLIARKKDWDPKKYGGFDSPTVAYSVLVVAKVEKGKSKKLKSVKELLGITIMERSSFEKNPIDFLEAKGYKEVKKDLIIKLPKYSLFELENGRKRMLASAGELQKGNELALPSKYVNFLYLASHYEKLKGSPEDNEQKQLFVEQHKHYLDEIIEQISEFSKRVILADANLDKVLSAYNKHRDKPIREQAENIIHLFTLTNLGAPAAFKYFDTTIDRKRYTSTKEVLDATLIHQSITGLYETRIDLSQLGGDGSPKKKRKVSSDYKDHDGDYKDHDIDYKDDDDKAAG

SEQ ID NO: 43 - DNA, 4107 bp, Streptococcus pyogenes
atggataagaaatactcaataggcttagatatcggcacaaatagcgtcggatgggcggtgatcactgatgaatataaggttccgtctaaaaagttcaaggttctgggaaatacagaccgccacagtatcaaaaaaaatcttataggggctcttttatttgacagtggagagacagcggaagcgactcgtctcaaacggacagctcgtagaaggtatacacgtcggaagaatcgtatttgttatctacaggagattttttcaaatgagatggcgaaagtagatgatagtttctttcatcgacttgaagagtcttttttggtggaagaagacaagaagcatgaacgtcatcctatttttggaaatatagtagatgaagttgcttatcatgagaaatatccaactatctatcatctgcgaaaaaaattggtagattctactgataaagcggatttgcgcttaatctatttggccttagcgcatatgattaagtttcgtggtcattttttgattgagggagatttaaatcctgataatagtgatgtggacaaactatttatccagttggtacaaacctacaatcaattatttgaagaaaaccctattaacgcaagtggagtagatgctaaagcgattctttctgcacgattgagtaaatcaagacgattagaaaatctcattgctcagctccccggtgagaagaaaaatggcttatttgggaatctcattgctttgtcattgggtttgacccctaattttaaatcaaattttgatttggcagaagatgctaaattacagctttcaaaagatacttacgatgatgatttagataatttattggcgcaaattggagatcaatatgctgatttgtttttggcagctaagaatttatcagatgctattttactttcagatatcctaagagtaaatactgaaataactaaggctcccctatcagcttcaatgattaaacgctacgatgaacatcatcaagacttgactcttttaaaagctttagttcgacaacaacttccagaaaagtataaagaaatcttttttgatcaatcaaaaaacggatatgcaggttatattgatgggggagctagccaagaagaattttataaatttatcaaaccaattttagaaaaaatggatggtactgaggaattattggtgaaactaaatcgtgaagatttgctgcgcaagcaacggacctttgacaacggctctattccccatcaaattcacttgggtgagctgcatgctattttgagaagacaagaagacttttatccatttttaaaagacaatcgtgagaagattgaaaaaatcttgacttttcgaattccttattatgttggtccattggcgcgtggcaatagtcgttttgcatggatgactcggaagtctgaagaaacaattaccccatggaattttgaagaagttgtcgataaaggtgcttcagctcaatcatttattgaacgcatgacaaactttgataaaaatcttccaaatgaaaaagtactaccaaaacatagtttgctttatgagtattttacggtttataacgaattgacaaaggtcaaatatgttactgaaggaatgcgaaaaccagcatttctttcaggtgaacagaagaaagccattgttgatttactcttcaaaacaaatcgaaaagtaaccgttaagcaattaaaagaagattatttcaaaaaaatagaatgttttgatagtgttgaaatttcaggagttgaagatagatttaatgcttcattaggtacctaccatgatttgctaaaaattattaaagataaagattttttggataatgaagaaaatgaagatatcttagaggatattgttttaacattgaccttatttgaagatagggagatgattgaggaaagacttaaaacatatgctcacctctttgatgataaggtgatgaaacagcttaaacgtcgccgttatactggttggggacgtttgtctcgaaaattgattaatggtattagggataagcaatctggcaaaacaatattagattttttgaaatcagatggttttgccaatcgcaattttatgcagctgatccatgatgatagtttgacatttaaagaagacattcaaaaagcacaagtgtctggacaaggcgatagtttacatgaacatattgcaaatttagctggtagccctgctattaaaaaaggtattttacagactgtaaaagttgttgatgaattggtcaaagtaatggggcggcataagccagaaaatatcgttattgaaatggcacgtgaaaatcagacaactcaaaagggccagaaaaattcgcgagagcgtatgaaacgaatcgaagaaggtatcaaagaattaggaagtcagattcttaaagagcatcctgttgaaaatactcaattgcaaaatgaaaagctctatctctattatctccaaaatggaagagacatgtatgtggaccaagaattagatattaatcgtttaagtgattatgatgtcgatcacattgttccacaaagtttccttaaagacgattcaatagacaataaggtcttaacgcgttctgataaaaatcgtggtaaatcggataacgttccaagtgaagaagtagtcaaaaagatgaaaaactattggagacaacttctaaacgccaagttaatcactcaacgtaagtttgataatttaacgaaagctgaacgtggaggtttgagtgaacttgataaagctggttttatcaaacgccaattggttgaaactcgccaaatcactaagcatgtggcacaaattttggatagtcgcatgaatactaaatacgatgaaaatgataaacttattcgagaggttaaagtgattaccttaaaatctaaattagtttctgacttccgaaaagatttccaattctataaagtacgtgagattaacaattaccatcatgcccatgatgcgtatctaaatgccgtcgttggaactgctttgattaagaaatatccaaaacttgaatcggagtttgtctatggtgattataaagtttatgatgttcgtaaaatgattgctaagtctgagcaagaaataggcaaagcaaccgcaaaatatttcttttactctaatatcatgaacttcttcaaaacagaaattacacttgcaaatggagagattcgcaaacgccctctaatcgaaactaatggggaaactggagaaattgtctgggataaagggcgagattttgccacagtgcgcaaagtattgtccatgccccaagtcaatattgtcaagaaaacagaagtacagacaggcggattctccaaggagtcaattttaccaaaaagaaattcggacaagcttattgctcgtaaaaaagactgggatccaaaaaaatatggtggttttgatagtccaacggtagcttattcagtcctagtggttgctaaggtggaaaaagggaaatcgaagaagttaaaatccgttaaagagttactagggatcacaattatggaaagaagttcctttgaaaaaaatccgattgactttttagaagctaaaggatataaggaagttaaaaaagacttaatcattaaactacctaaatatagtctttttgagttagaaaacggtcgtaaacggatgctggctagtgccggagaattacaaaaaggaaatgagctggctctgccaagcaaatatgtgaattttttatatttagctagtcattatgaaaagttgaagggtagtccagaagataacgaacaaaaacaattgtttgtggagcagcataagcattatttagatgagattattgagcaaatcagtgaattttctaagcgtgttattttagcagatgccaatttagataaagttcttagtgcatataacaaacatagagacaaaccaatacgtgaacaagcagaaaatattattcatttatttacgttgacgaatcttggagctcccgctgcttttaaatattttgatacaacaattgatcgtaaacgatatacgtctacaaaagaagttttagatgccactcttatccatcaatccatcactggtctttatgaaacacgcattgatttgagtcagctaggaggtgactga

SEQ ID NO: 44 - protein, 1378 aa, Lactobacillus fermentum
MKEYHIGLDIGTSSIGWAVTDSQFKLMRIKGKTAIGVRLFEEGKTAAERRTFRTTRRRLKRRKWRLHYLDEIFAPHLQEVDENFLRRLKQSNIHPEDPTKNQAFIGKLLFPDLLKKNERGYPTLIKMRDELPVEQRAHYPVMNIYKLREAMINEDRQFDLREVYLAVHHIVKYRGHFLNNASVDKFKVGRIDFDKSFNVLNEAYEELQNGEGSFTIEPSKVEKIGQLLLDTKMRKLDRQKAVAKLLEVKVADKEETKRNKQIATAMSKLVLGYKADFATVAMANGNEWKIDLSSETSEDEIEKFREELSDAQNDILTEITSLFSQIMLNEIVPNGMSISESMMDRYWTHERQLAEVKEYLATQPASARKEFDQVYNKYIGQAPKERGFDLEKGLKKILSKKENWKEIDELLKAGDFLPKQRTSANGVIPHQMHQQELDRIIEKQAKYYPWLATENPATGERDRHQAKYELDQLVSFRIPYYVGPLVTPEVQKATSGAKFAWAKRKEDGEITPWNLWDKIDRAESAEAFIKRMTVKDTYLLNEDVLPANSLLYQKYNVLNELNNVRVNGRRLSVGIKQDIYTELFKKKKTVKASDVASLVMAKTRGVNKPSVEGLSDPKKFNSNLATYLDLKSIVGDKVDDNRYQTDLENIIEWRSVFEDGEIFADKLTEVEWLTDEQRSALVKKRYKGWGRLSKKLLTGIVDENGQRIIDLMWNTDQNFKEIVDQPVFKEQIDQLNQKAITNDGMTLRERVESVLDDAYTSPQNKKAIWQVVRVVEDIVKAVGNAPKSISIEFARNEGNKGEITRSRRTQLQKLFEDQAHELVKDTSLTEELEKAPDLSDRYYFYFTQGGKDMYTGDPINFDEISTKYDIDHILPQSFVKDNSLDNRVLTSRKENNKKSDQVPAKLYAAKMKPYWNQLLKQGLITQRKFENLTKDVDQNIKYRSLGFVKRQLVETRQVIKLTANILGSMYQEAGTEIIETRAGLTKQLREEFDLPKVREVNDYHHAVDAYLTTFAGQYLNRRYPKLRSFFVYGEYMKFKHGSDLKLRNFNFFHELMEGDKSQGKVVDQQTGELITTRDEVAKSFDRLLNMKYMLVSKEVHDRSDQLYGATIVTAKESGKLTSPIEIKKNRLVDLYGAYTNGTSAFMTIIKFTGNKPKYKVIGIPTTSAASLKRAGKPGSESYNQELHRIIKSNPKVKKGFEIVVPHVSYGQLIVDGDCKFTLASPTVQHPATQLVLSKKSLETISSGYKILKDKPAIANERLIRVFDEVVGQMNRYFTIFDQRSNRQKVADARDKFLSLPTESKYEGAKKVQVGKTEVITNLLMGLHANATQGDLKVLGLATFGFFQSTTGLSLSEDTMIVYQSPTGLFERRICLKDI

SEQ ID NO: 45 - protein, 1053 aa, Staphylococcus aureus
MGKRNYILGLDIGITSVGYGIIDYETRDVIDAGVRLFKEANVENNEGRRSKRGARRLKRRRRHRIQRVKKLLFDYNLLTDHSELSGINPYEARVKGLSQKLSEEEFSAALLHLAKRRGVHNVNEVEEDTGNELSTKEQISRNSKALEEKYVAELQLERLKKDGEVRGSINRFKTSDYVKEAKQLLKVQKAYHQLDQSFIDTYIDLLETRRTYYEGPGEGSPFGWKDIKEWYEMLMGHCTYFPEELRSVKYAYNADLYNALNDLNNLVITRDENEKLEYYEKFQIIENVFKQKKKPTLKQIAKEILVNEEDIKGYRVTSTGKPEFTNLKVYHDIKDITARKEIIENAELLDQIAKILTIYQSSEDIQEELTNLNSELTQEEIEQISNLKGYTGTHNLSLKAINLILDELWHTNDNQIAIFNRLKLVPKKVDLSQQKEIPTTLVDDFILSPVVKRSFIQSIKVINAIIKKYGLPNDIIIELAREKNSKDAQKMINEMQKRNRQTNERIEEIIRTTGKENAKYLIEKIKLHDMQEGKCLYSLEAIPLEDLLNNPFNYEVDHIIPRSVSFDNSFNNKVLVKQEENSKKGNRTPFQYLSSSDSKISYETFKKHILNLAKGKGRISKTKKEYLLEERDINRFSVQKDFINRNLVDTRYATRGLMNLLRSYFRVNNLDVKVKSINGGFTSFLRRKWKFKKERNKGYKHHAEDALIIANADFIFKEWKKLDKAKKVMENQMFEEKQAESMPEIETEQEYKEIFITPHQIKHIKDFKDYKYSHRVDKKPNRKLINDTLYSTRKDDKGNTLIVNNLNGLYDKDNDKLKKLINKSPEKLLMYHHDPQTYQKLKLIMEQYGDEKNPLYKYYEETGNYLTKYSKKDNGPVIKKIKYYGNKLNAHLDITDDYPNSRNKVVKLSLKPYRFDVYLDNGVYKFVTVKNLDVIKKENYYEVNSKCYEEAKKLKKISNQAEFIASFYKNDLIKINGELYRVIGVNNDLLNRIEVNMIDITYREYLENMNDKRPPHIIKTIASKTQSIKKYSTDILGNLYEVKSKKHPQIIKK

SEQ ID NO: 46 - protein, 1409 aa, Streptococcus thermophilus
MLFNKCIIISINLDFSNKEKCMTKPYSIGLDIGTNSVGWAVITDNYKVPSKKMKVLGNTSKKYIKKNLLGVLLFDSGITAEGRRLKRTARRRYTRRRNRILYLQEIFSTEMATLDDAFFQRLDDSFLVPDDKRDSKYPIFGNLVEEKVYHDEFPTIYHLRKYLADSTKKADLRLVYLALAHMIKYRGHFLIEGEFNSKNNDIQKNFQDFLDTYNAIFESDLSLENSKQLEEIVKDKISKLEKKDRILKLFPGEKNSGIFSEFLKLIVGNQADFRKCFNLDEKASLHFSKESYDEDLETLLGYIGDDYSDVFLKAKKLYDAILLSGFLTVTDNETEAPLSSAMIKRYNEHKEDLALLKEYIRNISLKTYNEVFKDDTKNGYAGYIDGKTNQEDFYVYLKNLLAEFEGADYFLEKIDREDFLRKQRTFDNGSIPYQIHLQEMRAILDKQAKFYPFLAKNKERIEKILTFRIPYYVGPLARGNSDFAWSIRKRNEKITPWNFEDVIDKESSAEAFINRMTSFDLYLPEEKVLPKHSLLYETFNVYNELTKVRFIAESMRDYQFLDSKQKKDIVRLYFKDKRKVTDKDIIEYLHAIYGYDGIELKGIEKQFNSSLSTYHDLLNIINDKEFLDDSSNEAIIEEIIHTLTIFEDREMIKQRLSKFENIFDKSVLKKLSRRHYTGWGKLSAKLINGIRDEKSGNTILDYLIDDGISNRNFMQLIHDDALSFKKKIQKAQIIGDEDKGNIKEVVKSLPGSPAIKKGILQSIKIVDELVKVMGGRKPESIVVEMARENQYTNQGKSNSQQRLKRLEKSLKELGSKILKENIPAKLSKIDNNALQNDRLYLYYLQNGKDMYTGDDLDIDRLSNYDIDHIIPQAFLKDNSIDNKVLVSSASNRGKSDDFPSLEVVKKRKTFWYQLLKSKLISQRKFDNLTKAERGGLLPEDKAGFIQRQLVETRQITKHVARLLDEKFNNKKDENNRAVRTVKIITLKSTLVSQFRKDFELYKVREINDFHHAHDAYLNAVIASALLKKYPKLEPEFVYGDYPKYNSFRERKSATEKVYFYSNIMNIFKKSISLADGRVIERPLIEVNEETGESVWNKESDLATVRRVLSYPQVNVVKKVEEQNHGLDRGKPKGLFNANLSSKPKPNSNENLVGAKEYLDPKKYGGYAGISNSFAVLVKGTIEKGAKKKITNVLEFQGISILDRINYRKDKLNFLLEKGYKDIELIIELPKYSLFELSDGSRRMLASILSTNNKRGEIHKGNQIFLSQKFVKLLYHAKRISNTINENHRKYVENHKKEFEELFYYILEFNENYVGAKKNGKLLNSAFQSWQNHSIDELCSSFIGPTGSERKGLFELTSRGSAADFEFLGVKIPRYRDYTPSSLLKDATLIHQSVTGLYETRIDLAKLGEG

SEQ ID NO: 47 - protein, 1402 aa, Lactobacillus crispatus
MKIKNYNLALTPSTSAVGHVEVDDDLNILEPVHHQKAIGVAKFGEGETAEARRLARSARRTTKRRANRINHYFNEIMKPEIDKVDPLMFDRIKQAGLSPLDERKEFRTVIFDRPNIASYYHNQFPTIWHLQKYLMITDEKADIRLIYWALHSLLKHRGHFFNTTPMSQFKPGKLNLKDDMLALDDYNDLEGLSFAVANSPEIEKVIKDRSMHKKEKIAELKKLIVNDVPDKDLAKRNNKIITQIVNAIMGNSFHLNFIFDMDLDKLTSKAWSFKLDDPELDTKFDAISGSMTDNQIGIFETLQKIYSAISLLDILNGSSNVVDAKNALYDKHKRDLNLYFKFLNTLPDEIAKTLKAGYTLYIGNRKKDLLAARKLLKVNVAKNFSQDDFYKLINKELKSIDKQGLQTRFSEKVGELVAQNNFLPVQRSSDNVFIPYQLNAITFNKILENQGKYYDFLVKPNPAKKDRKNAPYELSQLMQFTIPYYVGPLVTPEEQVKSGIPKTSRFAWMVRKDNGAITPWNFYDKVDIEATADKFIKRSIAKDSYLLSELVLPKHSLLYEKYEVFNELSNVSLDGKKLSGGVKQILFNEVFKKTNKVNTSRILKALAKHNIPGSKITGLSNPEEFTSSLQTYNAWKKYFPNQIDNFAYQQDLEKMIEWSTVFEDHKILAKKLDEIEWLDDDQKKFVANTRLRGWGRLSKRLLTGLKDNYGKSIMQRLETTKANFQQIVYKPEFREQIDKISQAAAKNQSLEDILANSYTSPSNRKAIRKTMSVVDEYIKLNHGKEPDKIFLMFQRSEQEKGKQTEARSKQLNRILSQLKADKSANKLFSKQLADEFSNAIKKSKYKLNDKQYFYFQQLGRDALTGEVIDYDELYKYTVLHIIPRSKLTDDSQNNKVLTKYKIVDGSVALKFGNSYSDALGMPIKAFWTELNRLKLIPKGKLLNLTTDFSTLNKYQRDGYIARQLVETQQIVKLLATIMQSRFKHTKIIEVRNSQVANIRYQFDYFRIKNLNEYYRGFDAYLAAVVGTYLYKVYPKARRLFVYGQYLKPKKTNQENQDMHLDSEKKSQGFNFLWNLLYGKQDQIFVNGTDVIAFNRKDLITKMNTVYNYKSQKISLAIDYHNGAMFKATLFPRNDRDTAKTRKLIPKKKDYDTDIYGGYTSNVDGYMLLAEIIKRDGNKQYGFYGVPSRLVSELDTLKKTRYTEYEEKLKEIIKPELGVDLKKIKKIKILKNKVPFNQVIIDKGSKFFITSTSYRWNYRQLILSAESQQTLMDLVVDPDFSNHKARKDARKNADERLIKVYEEILYQVKNYMPMFVELHRCYEKLVDAQKTFKSLKISDKAMVLNQILILLHSNATSPVLEKLGYHTRFTLGKKHNLISENAVLVTQSITGLKENHVSIKQML

SEQ ID NO: 48 - protein, 1385 aa, Pedicoccus damnosus
MTNEKYSIGLDIGTSSIGFAVVNDNNRVIRVKGKNAIGVRLFDEGKAAADRRSFRTTRRSFRTTRRRLSRRRWRLKLLREIFDAYITPVDEAFFIRLKESNLSPKDSKKQYSGDILFNDRSDKDFYEKYPTIYHLRNALMTEHRKFDVREIYLAIHHIMKFRGHFLNATPANNFKVGRLNLEEKFEELNDIYQRVFPDESIEFRTDNLEQIKEVLLDNKRSRADRQRTLVSDIYQSSEDKDIEKRNKAVATEILKASLGNKAKLNVITNVEVDKEAAKEWSITFDSESIDDDLAKIEGQMTDDGHEIIEVLRSLYSGITLSAIVPENHTLSQSMVAKYDLHKDHLKLFKKLINGMTDTKKAKNLRAAYDGYIDGVKGKVLPQEDFYKQVQVNLDDSAEANEIQTYIDQDIFMPKQRTKANGSIPHQLQQQELDQIIENQKAYYPWLAELNPNPDKKRQQLAKYKLDELVTFRVPYYVGPMITAKDQKNQSGAEFAWMIRKEPGNITPWNFDQKVDRMATANQFIKRMTTTDTYLLGEDVLPAQSLLYQKFEVLNELNKIRIDHKPISIEQKQQIFNDLFKQFKNVTIKHLQDYLVSQGQYSKRPLIEGLADEKRFNSSLSTYSDLCGIFGAKLVEENDRQEDLEKIIEWSTIFEDKKIYRAKLNDLTWLTDDQKEKLATKRYQGWGRLSRKLLVGLKNSEHRNIMDILWITNENFMQIQAEPDFAKLVTDANKGMLEKTDSQDVINDLYTSPQNKKAIRQILLVVHDIQNAMHGQAPAKIHVEFARGEERNPRRSVQRQRQVEAAYEKVSNELVSAKVRQEFKEAINNKRDFKDRLFLYFMQGGIDIYTGKQLNIDQLSSYQIDHILPQAFVKDDSLTNRVLTNENQVKADSVPIDIFGKKMLSVWGRMKDQGLISKGKYRNLTMNPENISAHTENGFINRQLVETRQVIKLAVNILADEYGDSTQIISVKADLSHQMREDFELLKNRDVNDYHHAFDAYLAAFIGNYLLKRYPKLESYFVYGDFKKFTQKETKMRRFNFIYDLKHCDQVVNKETGEILWTKDEDIKYIRHLFAYKKILVSHEVREKRGALYNQTIYKAKDDKGSGQESKKLIRIKDDKETKIYGGYSGKSLAYMTIVQITKKNKVSYRVIGIPTLALARLNKLENDSTENNGELYKIIKPQFTHYKVDKKNGEIIETTDDFKIVVSKVRFQQLIDDAGQFFMLASDTYKNNAQQLVISNNALKAINNTNITDCPRDDLERLDNLRLDSAFDEIVKKMDKYFSAYDANNFREKIRNSNLIFYQLPVEDQWENNKITELGKRTVLTRILQGLHANATTTDMSIFKIKTPFGQLRQRSGISLSENAQLIYQSPTGLFERRVQLNKIK

SEQ ID NO: 49 - protein, 1367 aa, Fusobaterium nucleatum
MKKQKFSDYYLGFDIGTNSVGWCVTDLDYNVLRFNKKDMWGSRLFEEAKTAAERRVQRNSRRRLKRRKWRLNLLEEIFSNEILKIDSNFFRRLKESSLWLEDKSSKEKFTLFNDDNYKDYDFYKQYPTIFHLRNELIKNPEKKDIRLVYLAIHSIFKSRGHFLFEGQNLKEIKNFETLYNNLIAFLEDNGINKIIDKNNIEKLEKIVCDSKKGLKDKEKEFKEIFNSDKQLVAIFKLSVGSSVSLNDLFDTDEYKKGEVEKEKISFREQIYEDDKPIYYSILGEKIELLDIAKTFYDFMVLNNILADSQYISEAKVKLYEEHKKDLKNLKYIIRKYNKGNYDKLFKDKNENNYSAYIGLNKEKSKKEVIEKSRLKIDDLIKNIKGYLPKVEEIEEKDKAIFNKILNKIELKTILPKQRISDNGTLPYQIHEAELEKILENQSKYYDFLNYEENGIITKDKLLMTFKFRIPYYVGPLNSYHKDKGGNSWIVRKEEGKILPWNFEQKVDIEKSAEEFIKRMTNKCTYLNGEDVIPKDTFLYSEYVILNELNKVQVNDEFLNEENKRKIIDELFKENKKVSEKKFKEYLLVKQIVDGTIELKGVKDSFNSNYISYIRFKDIFGEKLNLDIYKEISEKSILWKCLYGDDKKIFEKKIKNEYGDILTKDEIKKINTFKFNNWGRLSEKLLTGIEFINLETGECYSSVMDALRRTNYNLMELLSSKFTLQESINNENKEMNEASYRDLIEESYVSPSLKRAIFQTLKIYEEIRKITGRVPKKVFIEMARGGDESMKNKKIPARQEQLKKLYDSCGNDIANFSIDIKEMKNSLISYDNNSLRQKKLYLYYLQFGKCMYTGREIDLDRLLQNNDTYDIDHIYPRSKVIKDDSFDNLVLVLKNENAEKSNEYPVKKEIQEKMKSFWRFLKEKNFISDEKYKRLTGKDDFELRGFMARQLVNVRQTTKEVGKILQQIEPEIKIVYSKAEIASSFREMFDFIKVRELNDTHHAKDAYLNIVAGNVYNTKFTEKPYRYLQEIKENYDVKKIYNYDIKNAWDKENSLEIVKKNMEKNTVNITRFIKEKKGQLFDLNPIKKGETSNEIISIKPKVYNGKDDKLNEKYGYYKSLNPAYFLYVEHKEKNKRIKSFERVNLVDVNNIKDEKSLVKYLIENKKLVEPRVIKKVYKRQVILINDYPYSIVTLDSNKLMDFENLKPLFLENKYEKILKNVIKFLEDNQGKSEENYKFIYLKKKDRYEKNETLESVKDRYNLEFNEMYDKFLEKLDSKDYKNYMNNKKYQELLDVKEKFIKLNLFDKAFTLKSFLDLFNRKTMADFSKVGLTKYLGKIQKISSNVLSKNELYLLEESVTGLFVKKIKL

SEQ ID NO: 50 - protein, 1286 aa, Enterococcus cecorum
RRKQRIQILQELLGEEVLKTDPGFFHRMKESRYVVEDKRTLDGKQVELPYALFVDKDYTDKEYYKQFPTINHLIVYLMTTSDTPDIRLVYLALHYYMKNRGNFLHSGDINNVKDINDILEQLDNVLETFLDGWNLKLKSYVEDIKNIYNRDLGRGERKKAFVNTLGAKTKAEKAFCSLISGGSTNLAELFDDSSLKEIETPKIEFASSSLEDKIDGIQEALEDRFAVIEAAKRLYDWKTLTDILGDSSSLAEARVNSYQMHHEQLLELKSLVKEYLDRKVFQEVFVSLNVANNYPAYIGHTKINGKKKELEVKRTKRNDFYSYVKKQVIEPIKKKVSDEAVLTKLSEIESLIEVDKYLPLQVNSDNGVIPYQVKLNELTRIFDNLENRIPVLRENRDKIIKTFKFRIPYYVGSLNGVVKNGKCTNWMVRKEEGKIYPWNFEDKVDLEASAEQFIRRMTNKCTYLVNEDVLPKYSLLYSKYLVLSELNNLRIDGRPLDVKIKQDIYENVFKKNRKVTLKKIKKYLLKEGIITDDDELSGLADDVKSSLTAYRDFKEKLGHLDLSEAQMENIILNITLFGDDKKLLKKRLAALYPFIDDKSLNRIATLNYRDWGRLSERFLSGITSVDQETGELRTIIQCMYETQANLMQLLAEPYHFVEAIEKENPKVDLESISYRIVNDLYVSPAVKRQIWQTLLVIKDIKQVMKHDPERIFIEMAREKQESKKTKSRKQVLSEVYKKAKEYEHLFEKLNSLTEEQLRSKKIYLYFTQLGKCMYSGEPIDFENLVSANSNYDIDHIYPQSKTIDDSFNNIVLVKKSLNAYKSNHYPIDKNIRDNEKVKTLWNTLVSKGLITKEKYERLIRSTPFSDEELAGFIARQLVETRQSTKAVAEILSNWFPESEIVYSKAKNVSNFRQDFEILKVRELNDCHHAHDAYLNIVVGNAYHTKFTNSPYRFIKNKANQEYNLRKLLQKVNKIESNGVVAWVGQSENNPGTIATVKKVIRRNTVLISRMVKEVDGQLFDLTLMKKGKGQVPIKSSDERLTDISKYGGYNKATGAYFTFVKSKKRGKVVRSFEYVPLHLSKQFENNNELLKEYIEKDRGLTDVEILIPKVLINSLFRYNGSLVRITGRGDTRLLLVHEQPLYVSNSFVQQLKSVSSYKLKKSENDNAKLTKTATEKLSNIDELYDGLLRKLDLPIYSYWFSSIKEYLVESRTKYIKLSIEEKALVIFEILHLFQSDAQVPNLKILGLSTKPSRIRIQKNLKDTDKMSIIHQSPSGIFEHEIELTSL

SEQ ID NO: 51 - protein, 1312 aa, Anaerostipes hadrus
MQNGFLGITVSSEQVGWAVTNPKYELERASRKDLWGVRLFDKAETAEDRRMFRTNRRLNQRKKNRIHYLRDIFHEEVNQKDPNFFQQLDESNFCEDDRTVEFNFDTNLYKNQFPTVYHLRKYLMETKDKPDIRLVYLAFSKFMKNRGHFLYKGNLGEVMDFENSMKGFCESLEKFNIDFPTLSDEQVKEVRDILCDHKIAKTVKKKNIITITKVKSKTAKAWIGLFCGCSVPVKVLFQDIDEEIVTDPEKISFEDASYDDYIANIEKGVGIYYEAIVSAKMLFDWSILNEILGDHQLLSDAMIAEYNKHHDDLKRLQKIIKGTGSRELYQDIFINDVSGNYVCYVGHAKTMSSADQKQFYTFLKNRLKNVNGISSEDAEWIDTEIKNGTLLPKQTKRDNSVIPHQLQLREFELILDNMQEMYPFLKENREKLLKIFNFVIPYYVGPLKGVVRKGESTNWMVPKKDGVIHPWNFDEMVDKEASAECFISRMTGNCSYLFNEKVLPKNSLLYETFEVLNELNPLKINGEPISVELKQRIYEQLFLTGKKVTKKSLTKYLIKNGYDKDIELSGIDNEFHSNLKSHIDFEDYDNLSDEEVEQIILRITVFEDKQLLKDYLNREFVKLSEDERKQICSLSYKGWGNLSEMLLNGITVTDSNGVEVSVMDMLWNTNLNLMQILSKKYGYKAEIEHYNKEHEKTIYNREDLMDYLNIPPAQRRKVNQLITIVKSLKKTYGVPNKIFFKISREHQDDPKRTSSRKEQLKYLYKSLKSEDEKHLMKELDELNDHELSNDKVYLYFLQKGRCIYSGKKLNLSRLRKSNYQNDIDYIYPLSAVNDRSMNNKVLTGIQENRADKYTYFPVDSEIQKKMKGFWMELVLQGFMTKEKYFRLSRENDFSKSELVSFIEREISDNQQSGRMIASVLQYYFPESKIVFVKEKLISSFKRDFHLISSYGHNHLQAAKDAYITIVVGNVYHTKFTMDPAIYFKNHKRKDYDLNRLFLENISRDGQIAWESGPYGSIQTVRKEYAQNHIAVTKRVVEVKGGLFKQMPLKKGHGEYPLKTNDPRFGNIAQYGGYTNVTGSYFVLVESMEKGKKRISLEYVPVYLHERLEDDPGHKLLKEYLVDHRKLNHPKILLAKVRKNSLLKIDGFYYRLNGRSGNALILTNAVELIMDDWQTKTANKISGYMKRRAIDKKARVYQNEFHIQELEQLYDFYLDKLKNGVYKNRKNNQAELIHNEKEQFMELKTEDQCVLLTEIKKLFVCSPMQADLTLIGGSKHTGMIAMSSNVTKADFAVIAEDPLGLRNKVIYSHKGEK

SEQ ID NO: 52 - protein, 1344 aa, Kandleria vitulina
MSQNNNKIYNIGLDIGDASVGWAVVDEHYNLLKRHGKHMWGSRLFTQANTAVERRSSRSTRRRYNKRRERIRLLREIMEDMVLDVDPTFFIRLANVSFLDQEDKKDYLKENYHSNYNLFIDKDFNDKTYYDKYPTIYHLRKHLCESKEKEDPRLIYLALHHIVKYRGNFLYEGQKFSMDVSNIEDKMIDVLRQFNEINLFEYVEDRKKIDEVLNVLKEPLSKKHKAEKAFALFDTTKDNKAAYKELCAALAGNKFNVTKMLKEAELHDEDEKDISFKFSDATFDDAFVEKQPLLGDCVEFIDLLHDIYSWVELQNILGSAHTSEPSISAAMIQRYEDHKNDLKLLKDVIRKYLPKKYFEVFRDEKSKKNNYCNYINHPSKTPVDEFYKYIKKLIEKIDDPDVKTILNKIELESFMLKQNSRTNGAVPYQMQLDELNKILENQSVYYSDLKDNEDKIRSILTFRIPYYFGPLNITKDRQFDWIIKKEGKENERILPWNANEIVDVDKTADEFIKRMRNFCTYFPDEPVMAKNSLTVSKYEVLNEINKLRINDHLIKRDMKDKMLHTLFMDHKSISANAMKKWLVKNQYFSNTDDIKIEGFQKENACSTSLTPWIDFTKIFGKINESNYDFIEKIIYDVTVFEDKKILRRRLKKEYDLDEEKIKKILKLKYSGWSRLSKKLLSGIKTKYKDSTRTPETVLEVMERTNMNLMQVINDEKLGFKKTIDDANSTSVSGKFSYAEVQELAGSPAIKRGIWQALLIVDEIKKIMKHEPAHVYIEFARNEDEKERKDSFVNQMLKLYKDYDFEDETEKEANKHLKGEDAKSKIRSERLKLYYTQMGKCMYTGKSLDIDRLDTYQVDHIVPQSLLKDDSIDNKVLVLSSENQRKLDDLVIPSSIRNKMYGFWEKLFNNKIISPKKFYSLIKTEFNEKDQERFINRQIVETRQITKHVAQIIDNHYENTKVVTVRADLSHQFRERYHIYKNRDINDFHHAHDAYIATILGTYIGHRFESLDAKYIYGEYKRIFRNQKNKGKEMKKNNDGFILNSMRNIYADKDTGEIVWDPNYIDRIKKCFYYKDCFVTKKLEENNGTFFNVTVLPNDTNSDKDNTLATVPVNKYRSNVNKYGGFSGVNSFIVAIKGKKKKGKKVIEVNKLTGIPLMYKNADEEIKINYLKQAEDLEEVQIGKEILKNQLIEKDGGLYYIVAPTEIINAKQLILNESQTKLVCEIYKAMKYKNYDNLDSEKIIDLYRLLINKMELYYPEYRKQLVKKFEDRYEQLKVISIEEKCNIIKQILATLHCNSSIGKIMYSDFKISTTIGRLNGRTISLDDISFIAESPTGMYSKKYKL

SEQ ID NO: 53 - protein, 1288 aa, Enterococcus faecalis
MRLFEEGHTAEDRRLKRTARRRISRRRNRLRYLQAFFEEAMTDLDENFFARLQESFLVPEDKKWHRHPIFAKLEDEVAYHETYPTIYHLRKKLADSSEQADLRLIYLALAHIVKYRGHFLIEGKLSTENTSVKDQFQQFMVIYNQTFVNGESRLVSAPLPESVLIEEELTEKASRTKKSEKVLQQFPQEKANGLFGQFLKLMVGNKADFKKVFGLEEEAKITYASESYEEDLEGILAKVGDEYSDVFLAAKNVYDAVELSTILADSDKKSHAKLSSSMIVRFTEHQEDLKKFKRFIRENCPDEYDNLFKNEQKDGYAGYIAHAGKVSQLKFYQYVKKIIQDIAGAEYFLEKIAQENFLRKQRTFDNGVIPHQIHLAELQAIIHRQAAYYPFLKENQEKIEQLVTFRIPYYVGPLSKGDASTFAWLKRQSEEPIRPWNLQETVDLDQSATAFIERMTNFDTYLPSEKVLPKHSLLYEKFMVFNELTKISYTDDRGIKANFSGKEKEKIFDYLFKTRRKVKKKDIIQFYRNEYNTEIVTLSGLEEDQFNASFSTYQDLLKCGLTRAELDHPDNAEKLEDIIKILTIFEDRQRIRTQLSTFKGQFSAEVLKKLERKHYTGWGRLSKKLINGIYDKESGKTILDYLVKDDGVSKHYNRNFMQLINDSQLSFKNAIQKAQSSEHEETLSETVNELAGSPAIKKGIYQSLKIVDELVAIMGYAPKRIVVEMARENQTTSTGKRRSIQRLKIVEKAMAEIGSNLLKEQPTTNEQLRDTRLFLYYMQNGKDMYTGDELSLHRLSHYDIDHIIPQSFMKDDSLDNLVLVGSTENRGKSDDVPSKEVVKDMKAYWEKLYAAGLISQRKFQRLTKGEQGGLTLEDKAHFIQRQLVETRQITKNVAGILDQRYNAKSKEKKVQIITLKASLTSQFRSIFGLYKVREVNDYHHGQDAYLNCVVATTLLKVYPNLAPEFVYGEYPKFQTFKENKATAKAIIYTNLLRFFTEDEPRFTKDGEILWSNSYLKTIKKELNYHQMNIVKKVEVQKGGFSKESIKPKGPSNKLIPVKNGLDPQKYGGFDSPVVAYTVLFTHEKGKKPLIKQEILGITIMEKTRFEQNPILFLEEKGFLRPRVLMKLPKYTLYEFPEGRRRLLASAKEAQKGNQMVLPEHLLTLLYHAKQCLLPNQSESLAYVEQHQPEFQEILERVVDFAEVHTLAKSKVQQIVKLFEANQTADVKEIAASFIQLMQFNAMGAPSTFKFFQKDIERARYTSIKEIFDATIIYQSPTGLYETRRKVVD

SEQ ID NO: 54 - protein, 1052 aa, Staphylococcus aureus
KRNYILGLDIGITSVGYGIIDYETRDVIDAGVRLFKEANVENNEGRRSKRGARRLKRRRRHRIQRVKKLLFDYNLLTDHSELSGINPYEARVKGLSQKLSEEEFSAALLHLAKRRGVHNVNEVEEDTGNELSTKEQISRNSKALEEKYVAELQLERLKKDGEVRGSINRFKTSDYVKEAKQLLKVQKAYHQLDQSFIDTYIDLLETRRTYYEGPGEGSPFGWKDIKEWYEMLMGHCTYFPEELRSVKYAYNADLYNALNDLNNLVITRDENEKLEYYEKFQIIENVFKQKKKPTLKQIAKEILVNEEDIKGYRVTSTGKPEFTNLKVYHDIKDITARKEIIENAELLDQIAKILTIYQSSEDIQEELTNLNSELTQEEIEQISNLKGYTGTHNLSLKAINLILDELWHTNDNQIAIFNRLKLVPKKVDLSQQKEIPTTLVDDFILSPVVKRSFIQSIKVINAIIKKYGLPNDIIIELAREKNSKDAQKMINEMQKRNRQTNERIEEIIRTTGKENAKYLIEKIKLHDMQEGKCLYSLEAIPLEDLLNNPFNYEVDHIIPRSVSFDNSFNNKVLVKQEENSKKGNRTPFQYLSSSDSKISYETFKKHILNLAKGKGRISKTKKEYLLEERDINRFSVQKDFINRNLVDTRYATRGLMNLLRSYFRVNNLDVKVKSINGGFTSFLRRKWKFKKERNKGYKHHAEDALIIANADFIFKEWKKLDKAKKVMENQMFEEKQAESMPEIETEQEYKEIFITPHQIKHIKDFKDYKYSHRVDKKPNRELINDTLYSTRKDDKGNTLIVNNLNGLYDKDNDKLKKLINKSPEKLLMYHHDPQTYQKLKLIMEQYGDEKNPLYKYYEETGNYLTKYSKKDNGPVIKKIKYYGNKLNAHLDITDDYPNSRNKVVKLSLKPYRFDVYLDNGVYKFVTVKNLDVIKKENYYEVNSKCYEEAKKLKKISNQAEFIASFYNNDLIKINGELYRVIGVNNDLLNRIEVNMIDITYREYLENMNDKRPPRIIKTIASKTQSIKKYSTDILGNLYEVKSKKHPQIIKKG

SEQ ID NO: 55 - protein, 1082 aa, Geobacillus thermodenitrificans
MKYKIGLDIGITSIGWAVINLDIPRIEDLGVRIFDRAENPKTGESLALPRRLARSARRRLRRRKHRLERIRRLFVREGILTKEELNKLFEKKHEIDVWQLRVEALDRKLNNDELARILLHLAKRRGFRSNRKSERTNKENSTMLKHIEENQSILSSYRTVAEMVVKDPKFSLHKRNKEDNYTNTVARDDLEREIKLIFAKQREYGNIVCTEAFEHEYISIWASQRPFASKDDIEKKVGFCTFEPKEKRAPKATYTFQSFTVWEHINKLRLVSPGGIRALTDDERRLIYKQAFHKNKITFHDVRTLLNLPDDTRFKGLLYDRNTTLKENEKVRFLELGAYHKIRKAIDSVYGKGAAKSFRPIDFDTFGYALTMFKDDTDIRSYLRNEYEQNGKRMENLADKVYDEELIEELLNLSFSKFGHLSLKALRNILPYMEQGEVYSTACERAGYTFTGPKKKQKTVLLPNIPPIANPVVMRALTQARKVVNAIIKKYGSPVSIHIELARELSQSFDERRKMQKEQEGNRKKNETAIRQLVEYGLTLNPTGLDIVKFKLWSEQNGKCAYSLQPIEIERLLEPGYTEVDHVIPYSRSLDDSYTNKVLVLTKENREKGNRTPAEYLGLGSERWQQFETFVLTNKQFSKKKRDRLLRLHYDENEENEFKNRNLNDTRYISRFLANFIREHLKFADSDDKQKVYTVNGRITAHLRSRWNFNKNREESNLHHAVDAAIVACTTPSDIARVTAFYQRREQNKELSKKTDPQFPQPWPHFADELQARLSKNPKESIKALNLGNYDNEKLESLQPVFVSRMPKRSITGAAHQETLRRYIGIDERSGKIQTVVKKKLSEIQLDKTGHFPMYGKESDPRTYEAIRQRLLEHNNDPKKAFQEPLYKPKKNGELGPIIRTIKIIDTTNQVIPLNDGKTVAYNSNIVRVDVFEKDGKYYCVPIYTIDMMKGILPNKAIEPNKPYSEWKEMTEDYTFRFSLYPNDLIRIEFPREKTIKTAVGEEIKIKDLFAYYQTIDSSNGGLSLVSHDNNFSLRSIGSRTLKRFEKYQVDVLGNIYKVRGEKRVGVASSSHSKAGETIRPL

SEQ ID NO: 56 - protein, 1375 aa, Streptococcus canis
MEKKYSIGLDIGTNSVGWAVITDDYKVPSKKFKVLGNTNRKSIKKNLMGALLFDSGETAEATRLKRTARRRYTRRKNRIRYLQEIFANEMAKLDDSFFQRLEESFLVEEDKKNERHPIFGNLADEVAYHRNYPTIYHLRKKLADSPEKADLRLIYLALAHIIKFRGHFLIEGKLNAENSDVAKLFYQLIQTYNQLFEESPLDEIEVDAKGILSARLSKSKRLEKLIAVFPNEKKNGLFGNIIALALGLTPNFKSNFDLTEDAKLQLSKDTYDDDLDELLGQIGDQYADLFSAAKNLSDAILLSDILRSNSEVTKAPLSASMVKRYDEHHQDLALLKTLVRQQFPEKYAEIFKDDTKNGYAGYVGIGIKHRKRTTKLATQEEFYKFIKPILEKMDGAEELLAKLNRDDLLRKQRTFDNGSIPHQIHLKELHAILRRQEEFYPFLKENREKIEKILTFRIPYYVGPLARGNSRFAWLTRKSEEAITPWNFEEVVDKGASAQSFIERMTNFDEQLPNKKVLPKHSLLYEYFTVYNELTKVKYVTERMRKPEFLSGEQKKAIVDLLFKTNRKVTVKQLKEDYFKKIECFDSVEIIGVEDRFNASLGTYHDLLKIIKDKDFLDNEENEDILEDIVLTLTLFEDREMIEERLKTYAHLFDDKVMKQLKRRHYTGWGRLSRKMINGIRDKQSGKTILDFLKSDGFSNRNFMQLIHDDSLTFKEEIEKAQVSGQGDSLHEQIADLAGSPAIKKGILQTVKIVDELVKVMGHKPENIVIEMARENQTTTKGLQQSRERKKRIEEGIKELESQILKENPVENTQLQNEKLYLYYLQNGRDMYVDQELDINRLSDYDVDHIVPQSFIKDDSIDNKVLTRSVENRGKSDNVPSEEVVKKMKNYWRQLLNAKLITQRKFDNLTKAERGGLSEADKAGFIKRQLVETRQITKHVARILDSRMNTKRDKNDKPIREVKVITLKSKLVSDFRKDFQLYKVRDINNYHHAHDAYLNAVVGTALIKKYPKLESEFVYGDYKVYDVRKMIAKSEQEIGKATAKRFFYSNIMNFFKTEVKLANGEIRKRPLIETNGETGEVVWNKEKDFATVRKVLAMPQVNIVKKTEVQTGGFSKESILSKRESAKLIPRKKGWDTRKYGGFGSPTVAYSILVVAKVEKGKAKKLKSVKVLVGITIMEKGSYEKDPIGFLEAKGYKDIKKELIFKLPKYSLFELENGRRRMLASATELQKANELVLPQHLVRLLYYTQNISATTGSNNLGYIEQHREEFKEIFEKIIDFSEKYILKNKVNSNLKSSFDEQFAVSDSILLSNSFVSLLKYTSFGASGGFTFLDLDVKQGRLRYQTVTEVLDATLIYQSITGLYETRTDLSQLGGD

SEQ ID NO: 57 - protein, 1368 aa, Artificial Sequence
  Synthetic
  misc_feature (10)..(10): Xaa can be any naturally occurring amino acid
  misc_feature (840)..(840): Xaa can be any naturally occurring amino acid
MDKKYSIGLXIGTNSVGWAVITDEYKVPSKKFKVLGNTDRHSIKKNLIGALLFDSGETAEATRLKRTARRRYTRRKNRICYLQEIFSNEMAKVDDSFFHRLEESFLVEEDKKHERHPIFGNIVDEVAYHEKYPTIYHLRKKLVDSTDKADLRLIYLALAHMIKFRGHFLIEGDLNPDNSDVDKLFIQLVQTYNQLFEENPINASGVDAKAILSARLSKSRRLENLIAQLPGEKKNGLFGNLIALSLGLTPNFKSNFDLAEDAKLQLSKDTYDDDLDNLLAQIGDQYADLFLAAKNLSDAILLSDILRVNTEITKAPLSASMIKRYDEHHQDLTLLKALVRQQLPEKYKEIFFDQSKNGYAGYIDGGASQEEFYKFIKPILEKMDGTEELLVKLNREDLLRKQRTFDNGSIPHQIHLGELHAILRRQEDFYPFLKDNREKIEKILTFRIPYYVGPLARGNSRFAWMTRKSEETITPWNFEEVVDKGASAQSFIERMTNFDKNLPNEKVLPKHSLLYEYFTVYNELTKVKYVTEGMRKPAFLSGEQKKAIVDLLFKTNRKVTVKQLKEDYFKKIECFDSVEISGVEDRFNASLGTYHDLLKIIKDKDFLDNEENEDILEDIVLTLTLFEDREMIEERLKTYAHLFDDKVMKQLKRRRYTGWGRLSRKLINGIRDKQSGKTILDFLKSDGFANRNFMQLIHDDSLTFKEDIQKAQVSGQGDSLHEHIANLAGSPAIKKGILQTVKVVDELVKVMGRHKPENIVIEMARENQTTQKGQKNSRERMKRIEEGIKELGSQILKEHPVENTQLQNEKLYLYYLQNGRDMYVDQELDINRLSDYDVDXIVPQSFLKDDSIDNKVLTRSDKNRGKSDNVPSEEVVKKMKNYWRQLLNAKLITQRKFDNLTKAERGGLSELDKAGFIKRQLVETRQITKHVAQILDSRMNTKYDENDKLIREVKVITLKSKLVSDFRKDFQFYKVREINNYHHAHDAYLNAVVGTALIKKYPKLESEFVYGDYKVYDVRKMIAKSEQEIGKATAKYFFYSNIMNFFKTEITLANGEIRKRPLIETNGETGEIVWDKGRDFATVRKVLSMPQVNIVKKTEVQTGGFSKESILPKRNSDKLIARKKDWDPKKYGGFDSPTVAYSVLVVAKVEKGKSKKLKSVKELLGITIMERSSFEKNPIDFLEAKGYKEVKKDLIIKLPKYSLFELENGRKRMLASAGELQKGNELALPSKYVNFLYLASHYEKLKGSPEDNEQKQLFVEQHKHYLDEIIEQISEFSKRVILADANLDKVLSAYNKHRDKPIREQAENIIHLFTLTNLGAPAAFKYFDTTIDRKRYTSTKEVLDATLIHQSITGLYETRIDLSQLGGD

SEQ ID NO: 58 - protein, 1368 aa, Artificial Sequence
  Synthetic
MDKKYSIGLAIGTNSVGWAVITDEYKVPSKKFKVLGNTDRHSIKKNLIGALLFDSGETAEATRLKRTARRRYTRRKNRICYLQEIFSNEMAKVDDSFFHRLEESFLVEEDKKHERHPIFGNIVDEVAYHEKYPTIYHLRKKLVDSTDKADLRLIYLALAHMIKFRGHFLIEGDLNPDNSDVDKLFIQLVQTYNQLFEENPINASGVDAKAILSARLSKSRRLENLIAQLPGEKKNGLFGNLIALSLGLTPNFKSNFDLAEDAKLQLSKDTYDDDLDNLLAQIGDQYADLFLAAKNLSDAILLSDILRVNTEITKAPLSASMIKRYDEHHQDLTLLKALVRQQLPEKYKEIFFDQSKNGYAGYIDGGASQEEFYKFIKPILEKMDGTEELLVKLNREDLLRKQRTFDNGSIPHQIHLGELHAILRRQEDFYPFLKDNREKIEKILTFRIPYYVGPLARGNSRFAWMTRKSEETITPWNFEEVVDKGASAQSFIERMTNFDKNLPNEKVLPKHSLLYEYFTVYNELTKVKYVTEGMRKPAFLSGEQKKAIVDLLFKTNRKVTVKQLKEDYFKKIECFDSVEISGVEDRFNASLGTYHDLLKIIKDKDFLDNEENEDILEDIVLTLTLFEDREMIEERLKTYAHLFDDKVMKQLKRRRYTGWGRLSRKLINGIRDKQSGKTILDFLKSDGFANRNFMQLIHDDSLTFKEDIQKAQVSGQGDSLHEHIANLAGSPAIKKGILQTVKVVDELVKVMGRHKPENIVIEMARENQTTQKGQKNSRERMKRIEEGIKELGSQILKEHPVENTQLQNEKLYLYYLQNGRDMYVDQELDINRLSDYDVDAIVPQSFLKDDSIDNKVLTRSDKNRGKSDNVPSEEVVKKMKNYWRQLLNAKLITQRKFDNLTKAERGGLSELDKAGFIKRQLVETRQITKHVAQILDSRMNTKYDENDKLIREVKVITLKSKLVSDFRKDFQFYKVREINNYHHAHDAYLNAVVGTALIKKYPKLESEFVYGDYKVYDVRKMIAKSEQEIGKATAKYFFYSNIMNFFKTEITLANGEIRKRPLIETNGETGEIVWDKGRDFATVRKVLSMPQVNIVKKTEVQTGGFSKESILPKRNSDKLIARKKDWDPKKYGGFDSPTVAYSVLVVAKVEKGKSKKLKSVKELLGITIMERSSFEKNPIDFLEAKGYKEVKKDLIIKLPKYSLFELENGRKRMLASAGELQKGNELALPSKYVNFLYLASHYEKLKGSPEDNEQKQLFVEQHKHYLDEIIEQISEFSKRVILADANLDKVLSAYNKHRDKPIREQAENIIHLFTLTNLGAPAAFKYFDTTIDRKRYTSTKEVLDATLIHQSITGLYETRIDLSQLGGD

SEQ ID NO: 59 - protein, 1368 aa, Artificial Sequence
  Synthetic
  misc_feature (10)..(10): Xaa can be any naturally occurring amino acid
MDKKYSIGLXIGTNSVGWAVITDEYKVPSKKFKVLGNTDRHSIKKNLIGALLFDSGETAEATRLKRTARRRYTRRKNRICYLQEIFSNEMAKVDDSFFHRLEESFLVEEDKKHERHPIFGNIVDEVAYHEKYPTIYHLRKKLVDSTDKADLRLIYLALAHMIKFRGHFLIEGDLNPDNSDVDKLFIQLVQTYNQLFEENPINASGVDAKAILSARLSKSRRLENLIAQLPGEKKNGLFGNLIALSLGLTPNFKSNFDLAEDAKLQLSKDTYDDDLDNLLAQIGDQYADLFLAAKNLSDAILLSDILRVNTEITKAPLSASMIKRYDEHHQDLTLLKALVRQQLPEKYKEIFFDQSKNGYAGYIDGGASQEEFYKFIKPILEKMDGTEELLVKLNREDLLRKQRTFDNGSIPHQIHLGELHAILRRQEDFYPFLKDNREKIEKILTFRIPYYVGPLARGNSRFAWMTRKSEETITPWNFEEVVDKGASAQSFIERMTNFDKNLPNEKVLPKHSLLYEYFTVYNELTKVKYVTEGMRKPAFLSGEQKKAIVDLLFKTNRKVTVKQLKEDYFKKIECFDSVEISGVEDRFNASLGTYHDLLKIIKDKDFLDNEENEDILEDIVLTLTLFEDREMIEERLKTYAHLFDDKVMKQLKRRRYTGWGRLSRKLINGIRDKQSGKTILDFLKSDGFANRNFMQLIHDDSLTFKEDIQKAQVSGQGDSLHEHIANLAGSPAIKKGILQTVKVVDELVKVMGRHKPENIVIEMARENQTTQKGQKNSRERMKRIEEGIKELGSQILKEHPVENTQLQNEKLYLYYLQNGRDMYVDQELDINRLSDYDVDHIVPQSFLKDDSIDNKVLTRSDKNRGKSDNVPSEEVVKKMKNYWRQLLNAKLITQRKFDNLTKAERGGLSELDKAGFIKRQLVETRQITKHVAQILDSRMNTKYDENDKLIREVKVITLKSKLVSDFRKDFQFYKVREINNYHHAHDAYLNAVVGTALIKKYPKLESEFVYGDYKVYDVRKMIAKSEQEIGKATAKYFFYSNIMNFFKTEITLANGEIRKRPLIETNGETGEIVWDKGRDFATVRKVLSMPQVNIVKKTEVQTGGFSKESILPKRNSDKLIARKKDWDPKKYGGFDSPTVAYSVLVVAKVEKGKSKKLKSVKELLGITIMERSSFEKNPIDFLEAKGYKEVKKDLIIKLPKYSLFELENGRKRMLASAGELQKGNELALPSKYVNFLYLASHYEKLKGSPEDNEQKQLFVEQHKHYLDEIIEQISEFSKRVILADANLDKVLSAYNKHRDKPIREQAENIIHLFTLTNLGAPAAFKYFDTTIDRKRYTSTKEVLDATLIHQSITGLYETRIDLSQLGGD

SEQ ID NO: 60 - protein, 1368 aa, Artificial Sequence
  Synthetic
  misc_feature (762)..(762): Xaa can be any naturally occurring amino acid
MDKKYSIGLDIGTNSVGWAVITDEYKVPSKKFKVLGNTDRHSIKKNLIGALLFDSGETAEATRLKRTARRRYTRRKNRICYLQEIFSNEMAKVDDSFFHRLEESFLVEEDKKHERHPIFGNIVDEVAYHEKYPTIYHLRKKLVDSTDKADLRLIYLALAHMIKFRGHFLIEGDLNPDNSDVDKLFIQLVQTYNQLFEENPINASGVDAKAILSARLSKSRRLENLIAQLPGEKKNGLFGNLIALSLGLTPNFKSNFDLAEDAKLQLSKDTYDDDLDNLLAQIGDQYADLFLAAKNLSDAILLSDILRVNTEITKAPLSASMIKRYDEHHQDLTLLKALVRQQLPEKYKEIFFDQSKNGYAGYIDGGASQEEFYKFIKPILEKMDGTEELLVKLNREDLLRKQRTFDNGSIPHQIHLGELHAILRRQEDFYPFLKDNREKIEKILTFRIPYYVGPLARGNSRFAWMTRKSEETITPWNFEEVVDKGASAQSFIERMTNFDKNLPNEKVLPKHSLLYEYFTVYNELTKVKYVTEGMRKPAFLSGEQKKAIVDLLFKTNRKVTVKQLKEDYFKKIECFDSVEISGVEDRFNASLGTYHDLLKIIKDKDFLDNEENEDILEDIVLTLTLFEDREMIEERLKTYAHLFDDKVMKQLKRRRYTGWGRLSRKLINGIRDKQSGKTILDFLKSDGFANRNFMQLIHDDSLTFKEDIQKAQVSGQGDSLHEHIANLAGSPAIKKGILQTVKVVDELVKVMGRHKPENIVIXMARENQTTQKGQKNSRERMKRIEEGIKELGSQILKEHPVENTQLQNEKLYLYYLQNGRDMYVDQELDINRLSDYDVDHIVPQSFLKDDSIDNKVLTRSDKNRGKSDNVPSEEVVKKMKNYWRQLLNAKLITQRKFDNLTKAERGGLSELDKAGFIKRQLVETRQITKHVAQILDSRMNTKYDENDKLIREVKVITLKSKLVSDFRKDFQFYKVREINNYHHAHDAYLNAVVGTALIKKYPKLESEFVYGDYKVYDVRKMIAKSEQEIGKATAKYFFYSNIMNFFKTEITLANGEIRKRPLIETNGETGEIVWDKGRDFATVRKVLSMPQVNIVKKTEVQTGGFSKESILPKRNSDKLIARKKDWDPKKYGGFDSPTVAYSVLVVAKVEKGKSKKLKSVKELLGITIMERSSFEKNPIDFLEAKGYKEVKKDLIIKLPKYSLFELENGRKRMLASAGELQKGNELALPSKYVNFLYLASHYEKLKGSPEDNEQKQLFVEQHKHYLDEIIEQISEFSKRVILADANLDKVLSAYNKHRDKPIREQAENIIHLFTLTNLGAPAAFKYFDTTIDRKRYTSTKEVLDATLIHQSITGLYETRIDLSQLGGD

SEQ ID NO: 61 - protein, 1368 aa, Artificial Sequence
  Synthetic
  misc_feature (983)..(983): Xaa can be any naturally occurring amino acid
MDKKYSIGLDIGTNSVGWAVITDEYKVPSKKFKVLGNTDRHSIKKNLIGALLFDSGETAEATRLKRTARRRYTRRKNRICYLQEIFSNEMAKVDDSFFHRLEESFLVEEDKKHERHPIFGNIVDEVAYHEKYPTIYHLRKKLVDSTDKADLRLIYLALAHMIKFRGHFLIEGDLNPDNSDVDKLFIQLVQTYNQLFEENPINASGVDAKAILSARLSKSRRLENLIAQLPGEKKNGLFGNLIALSLGLTPNFKSNFDLAEDAKLQLSKDTYDDDLDNLLAQIGDQYADLFLAAKNLSDAILLSDILRVNTEITKAPLSASMIKRYDEHHQDLTLLKALVRQQLPEKYKEIFFDQSKNGYAGYIDGGASQEEFYKFIKPILEKMDGTEELLVKLNREDLLRKQRTFDNGSIPHQIHLGELHAILRRQEDFYPFLKDNREKIEKILTFRIPYYVGPLARGNSRFAWMTRKSEETITPWNFEEVVDKGASAQSFIERMTNFDKNLPNEKVLPKHSLLYEYFTVYNELTKVKYVTEGMRKPAFLSGEQKKAIVDLLFKTNRKVTVKQLKEDYFKKIECFDSVEISGVEDRFNASLGTYHDLLKIIKDKDFLDNEENEDILEDIVLTLTLFEDREMIEERLKTYAHLFDDKVMKQLKRRRYTGWGRLSRKLINGIRDKQSGKTILDFLKSDGFANRNFMQLIHDDSLTFKEDIQKAQVSGQGDSLHEHIANLAGSPAIKKGILQTVKVVDELVKVMGRHKPENIVIEMARENQTTQKGQKNSRERMKRIEEGIKELGSQILKEHPVENTQLQNEKLYLYYLQNGRDMYVDQELDINRLSDYDVDHIVPQSFLKDDSIDNKVLTRSDKNRGKSDNVPSEEVVKKMKNYWRQLLNAKLITQRKFDNLTKAERGGLSELDKAGFIKRQLVETRQITKHVAQILDSRMNTKYDENDKLIREVKVITLKSKLVSDFRKDFQFYKVREINNYHXAHDAYLNAVVGTALIKKYPKLESEFVYGDYKVYDVRKMIAKSEQEIGKATAKYFFYSNIMNFFKTEITLANGEIRKRPLIETNGETGEIVWDKGRDFATVRKVLSMPQVNIVKKTEVQTGGFSKESILPKRNSDKLIARKKDWDPKKYGGFDSPTVAYSVLVVAKVEKGKSKKLKSVKELLGITIMERSSFEKNPIDFLEAKGYKEVKKDLIIKLPKYSLFELENGRKRMLASAGELQKGNELALPSKYVNFLYLASHYEKLKGSPEDNEQKQLFVEQHKHYLDEIIEQISEFSKRVILADANLDKVLSAYNKHRDKPIREQAENIIHLFTLTNLGAPAAFKYFDTTIDRKRYTSTKEVLDATLIHQSITGLYETRIDLSQLGGD

SEQ ID NO: 62 - protein, 1368 aa, Artificial Sequence
  Synthetic
  misc_feature (986)..(986): Xaa can be any naturally occurring amino acid
MDKKYSIGLDIGTNSVGWAVITDEYKVPSKKFKVLGNTDRHSIKKNLIGALLFDSGETAEATRLKRTARRRYTRRKNRICYLQEIFSNEMAKVDDSFFHRLEESFLVEEDKKHERHPIFGNIVDEVAYHEKYPTIYHLRKKLVDSTDKADLRLIYLALAHMIKFRGHFLIEGDLNPDNSDVDKLFIQLVQTYNQLFEENPINASGVDAKAILSARLSKSRRLENLIAQLPGEKKNGLFGNLIALSLGLTPNFKSNFDLAEDAKLQLSKDTYDDDLDNLLAQIGDQYADLFLAAKNLSDAILLSDILRVNTEITKAPLSASMIKRYDEHHQDLTLLKALVRQQLPEKYKEIFFDQSKNGYAGYIDGGASQEEFYKFIKPILEKMDGTEELLVKLNREDLLRKQRTFDNGSIPHQIHLGELHAILRRQEDFYPFLKDNREKIEKILTFRIPYYVGPLARGNSRFAWMTRKSEETITPWNFEEVVDKGASAQSFIERMTNFDKNLPNEKVLPKHSLLYEYFTVYNELTKVKYVTEGMRKPAFLSGEQKKAIVDLLFKTNRKVTVKQLKEDYFKKIECFDSVEISGVEDRFNASLGTYHDLLKIIKDKDFLDNEENEDILEDIVLTLTLFEDREMIEERLKTYAHLFDDKVMKQLKRRRYTGWGRLSRKLINGIRDKQSGKTILDFLKSDGFANRNFMQLIHDDSLTFKEDIQKAQVSGQGDSLHEHIANLAGSPAIKKGILQTVKVVDELVKVMGRHKPENIVIEMARENQTTQKGQKNSRERMKRIEEGIKELGSQILKEHPVENTQLQNEKLYLYYLQNGRDMYVDQELDINRLSDYDVDHIVPQSFLKDDSIDNKVLTRSDKNRGKSDNVPSEEVVKKMKNYWRQLLNAKLITQRKFDNLTKAERGGLSELDKAGFIKRQLVETRQITKHVAQILDSRMNTKYDENDKLIREVKVITLKSKLVSDFRKDFQFYKVREINNYHHAHXAYLNAVVGTALIKKYPKLESEFVYGDYKVYDVRKMIAKSEQEIGKATAKYFFYSNIMNFFKTEITLANGEIRKRPLIETNGETGEIVWDKGRDFATVRKVLSMPQVNIVKKTEVQTGGFSKESILPKRNSDKLIARKKDWDPKKYGGFDSPTVAYSVLVVAKVEKGKSKKLKSVKELLGITIMERSSFEKNPIDFLEAKGYKEVKKDLIIKLPKYSLFELENGRKRMLASAGELQKGNELALPSKYVNFLYLASHYEKLKGSPEDNEQKQLFVEQHKHYLDEIIEQISEFSKRVILADANLDKVLSAYNKHRDKPIREQAENIIHLFTLTNLGAPAAFKYFDTTIDRKRYTSTKEVLDATLIHQSITGLYETRIDLSQLGGD

SEQ ID NO: 63 - protein, 1368 aa, Artificial Sequence
  Synthetic
MDKKYSIGLAIGTNSVGWAVITDEYKVPSKKFKVLGNTDRHSIKKNLIGALLFDSGETAEATRLKRTARRRYTRRKNRICYLQEIFSNEMAKVDDSFFHRLEESFLVEEDKKHERHPIFGNIVDEVAYHEKYPTIYHLRKKLVDSTDKADLRLIYLALAHMIKFRGHFLIEGDLNPDNSDVDKLFIQLVQTYNQLFEENPINASGVDAKAILSARLSKSRRLENLIAQLPGEKKNGLFGNLIALSLGLTPNFKSNFDLAEDAKLQLSKDTYDDDLDNLLAQIGDQYADLFLAAKNLSDAILLSDILRVNTEITKAPLSASMIKRYDEHHQDLTLLKALVRQQLPEKYKEIFFDQSKNGYAGYIDGGASQEEFYKFIKPILEKMDGTEELLVKLNREDLLRKQRTFDNGSIPHQIHLGELHAILRRQEDFYPFLKDNREKIEKILTFRIPYYVGPLARGNSRFAWMTRKSEETITPWNFEEVVDKGASAQSFIERMTNFDKNLPNEKVLPKHSLLYEYFTVYNELTKVKYVTEGMRKPAFLSGEQKKAIVDLLFKTNRKVTVKQLKEDYFKKIECFDSVEISGVEDRFNASLGTYHDLLKIIKDKDFLDNEENEDILEDIVLTLTLFEDREMIEERLKTYAHLFDDKVMKQLKRRRYTGWGRLSRKLINGIRDKQSGKTILDFLKSDGFANRNFMQLIHDDSLTFKEDIQKAQVSGQGDSLHEHIANLAGSPAIKKGILQTVKVVDELVKVMGRHKPENIVIEMARENQTTQKGQKNSRERMKRIEEGIKELGSQILKEHPVENTQLQNEKLYLYYLQNGRDMYVDQELDINRLSDYDVDHIVPQSFLKDDSIDNKVLTRSDKNRGKSDNVPSEEVVKKMKNYWRQLLNAKLITQRKFDNLTKAERGGLSELDKAGFIKRQLVETRQITKHVAQILDSRMNTKYDENDKLIREVKVITLKSKLVSDFRKDFQFYKVREINNYHHAHDAYLNAVVGTALIKKYPKLESEFVYGDYKVYDVRKMIAKSEQEIGKATAKYFFYSNIMNFFKTEITLANGEIRKRPLIETNGETGEIVWDKGRDFATVRKVLSMPQVNIVKKTEVQTGGFSKESILPKRNSDKLIARKKDWDPKKYGGFDSPTVAYSVLVVAKVEKGKSKKLKSVKELLGITIMERSSFEKNPIDFLEAKGYKEVKKDLIIKLPKYSLFELENGRKRMLASAGELQKGNELALPSKYVNFLYLASHYEKLKGSPEDNEQKQLFVEQHKHYLDEIIEQISEFSKRVILADANLDKVLSAYNKHRDKPIREQAENIIHLFTLTNLGAPAAFKYFDTTIDRKRYTSTKEVLDATLIHQSITGLYETRIDLSQLGGD

SEQ ID NO: 64 - protein, 1368 aa, Artificial Sequence
  Synthetic
MDKKYSIGLDIGTNSVGWAVITDEYKVPSKKFKVLGNTDRHSIKKNLIGALLFDSGETAEATRLKRTARRRYTRRKNRICYLQEIFSNEMAKVDDSFFHRLEESFLVEEDKKHERHPIFGNIVDEVAYHEKYPTIYHLRKKLVDSTDKADLRLIYLALAHMIKFRGHFLIEGDLNPDNSDVDKLFIQLVQTYNQLFEENPINASGVDAKAILSARLSKSRRLENLIAQLPGEKKNGLFGNLIALSLGLTPNFKSNFDLAEDAKLQLSKDTYDDDLDNLLAQIGDQYADLFLAAKNLSDAILLSDILRVNTEITKAPLSASMIKRYDEHHQDLTLLKALVRQQLPEKYKEIFFDQSKNGYAGYIDGGASQEEFYKFIKPILEKMDGTEELLVKLNREDLLRKQRTFDNGSIPHQIHLGELHAILRRQEDFYPFLKDNREKIEKILTFRIPYYVGPLARGNSRFAWMTRKSEETITPWNFEEVVDKGASAQSFIERMTNFDKNLPNEKVLPKHSLLYEYFTVYNELTKVKYVTEGMRKPAFLSGEQKKAIVDLLFKTNRKVTVKQLKEDYFKKIECFDSVEISGVEDRFNASLGTYHDLLKIIKDKDFLDNEENEDILEDIVLTLTLFEDREMIEERLKTYAHLFDDKVMKQLKRRRYTGWGRLSRKLINGIRDKQSGKTILDFLKSDGFANRNFMQLIHDDSLTFKEDIQKAQVSGQGDSLHEHIANLAGSPAIKKGILQTVKVVDELVKVMGRHKPENIVIAMARENQTTQKGQKNSRERMKRIEEGIKELGSQILKEHPVENTQLQNEKLYLYYLQNGRDMYVDQELDINRLSDYDVDHIVPQSFLKDDSIDNKVLTRSDKNRGKSDNVPSEEVVKKMKNYWRQLLNAKLITQRKFDNLTKAERGGLSELDKAGFIKRQLVETRQITKHVAQILDSRMNTKYDENDKLIREVKVITLKSKLVSDFRKDFQFYKVREINNYHHAHDAYLNAVVGTALIKKYPKLESEFVYGDYKVYDVRKMIAKSEQEIGKATAKYFFYSNIMNFFKTEITLANGEIRKRPLIETNGETGEIVWDKGRDFATVRKVLSMPQVNIVKKTEVQTGGFSKESILPKRNSDKLIARKKDWDPKKYGGFDSPTVAYSVLVVAKVEKGKSKKLKSVKELLGITIMERSSFEKNPIDFLEAKGYKEVKKDLIIKLPKYSLFELENGRKRMLASAGELQKGNELALPSKYVNFLYLASHYEKLKGSPEDNEQKQLFVEQHKHYLDEIIEQISEFSKRVILADANLDKVLSAYNKHRDKPIREQAENIIHLFTLTNLGAPAAFKYFDTTIDRKRYTSTKEVLDATLIHQSITGLYETRIDLSQLGGD

SEQ ID NO: 65 - protein, 1368 aa, Artificial Sequence
  Synthetic
MDKKYSIGLDIGTNSVGWAVITDEYKVPSKKFKVLGNTDRHSIKKNLIGALLFDSGETAEATRLKRTARRRYTRRKNRICYLQEIFSNEMAKVDDSFFHRLEESFLVEEDKKHERHPIFGNIVDEVAYHEKYPTIYHLRKKLVDSTDKADLRLIYLALAHMIKFRGHFLIEGDLNPDNSDVDKLFIQLVQTYNQLFEENPINASGVDAKAILSARLSKSRRLENLIAQLPGEKKNGLFGNLIALSLGLTPNFKSNFDLAEDAKLQLSKDTYDDDLDNLLAQIGDQYADLFLAAKNLSDAILLSDILRVNTEITKAPLSASMIKRYDEHHQDLTLLKALVRQQLPEKYKEIFFDQSKNGYAGYIDGGASQEEFYKFIKPILEKMDGTEELLVKLNREDLLRKQRTFDNGSIPHQIHLGELHAILRRQEDFYPFLKDNREKIEKILTFRIPYYVGPLARGNSRFAWMTRKSEETITPWNFEEVVDKGASAQSFIERMTNFDKNLPNEKVLPKHSLLYEYFTVYNELTKVKYVTEGMRKPAFLSGEQKKAIVDLLFKTNRKVTVKQLKEDYFKKIECFDSVEISGVEDRFNASLGTYHDLLKIIKDKDFLDNEENEDILEDIVLTLTLFEDREMIEERLKTYAHLFDDKVMKQLKRRRYTGWGRLSRKLINGIRDKQSGKTILDFLKSDGFANRNFMQLIHDDSLTFKEDIQKAQVSGQGDSLHEHIANLAGSPAIKKGILQTVKVVDELVKVMGRHKPENIVIEMARENQTTQKGQKNSRERMKRIEEGIKELGSQILKEHPVENTQLQNEKLYLYYLQNGRDMYVDQELDINRLSDYDVDHIVPQSFLKDDSIDNKVLTRSDKNRGKSDNVPSEEVVKKMKNYWRQLLNAKLITQRKFDNLTKAERGGLSELDKAGFIKRQLVETRQITKHVAQILDSRMNTKYDENDKLIREVKVITLKSKLVSDFRKDFQFYKVREINNYHAAHDAYLNAVVGTALIKKYPKLESEFVYGDYKVYDVRKMIAKSEQEIGKATAKYFFYSNIMNFFKTEITLANGEIRKRPLIETNGETGEIVWDKGRDFATVRKVLSMPQVNIVKKTEVQTGGFSKESILPKRNSDKLIARKKDWDPKKYGGFDSPTVAYSVLVVAKVEKGKSKKLKSVKELLGITIMERSSFEKNPIDFLEAKGYKEVKKDLIIKLPKYSLFELENGRKRMLASAGELQKGNELALPSKYVNFLYLASHYEKLKGSPEDNEQKQLFVEQHKHYLDEIIEQISEFSKRVILADANLDKVLSAYNKHRDKPIREQAENIIHLFTLTNLGAPAAFKYFDTTIDRKRYTSTKEVLDATLIHQSITGLYETRIDLSQLGGD

SEQ ID NO: 66 - protein, 1368 aa, Artificial Sequence
  Synthetic
MDKKYSIGLDIGTNSVGWAVITDEYKVPSKKFKVLGNTDRHSIKKNLIGALLFDSGETAEATRLKRTARRRYTRRKNRICYLQEIFSNEMAKVDDSFFHRLEESFLVEEDKKHERHPIFGNIVDEVAYHEKYPTIYHLRKKLVDSTDKADLRLIYLALAHMIKFRGHFLIEGDLNPDNSDVDKLFIQLVQTYNQLFEENPINASGVDAKAILSARLSKSRRLENLIAQLPGEKKNGLFGNLIALSLGLTPNFKSNFDLAEDAKLQLSKDTYDDDLDNLLAQIGDQYADLFLAAKNLSDAILLSDILRVNTEITKAPLSASMIKRYDEHHQDLTLLKALVRQQLPEKYKEIFFDQSKNGYAGYIDGGASQEEFYKFIKPILEKMDGTEELLVKLNREDLLRKQRTFDNGSIPHQIHLGELHAILRRQEDFYPFLKDNREKIEKILTFRIPYYVGPLARGNSRFAWMTRKSEETITPWNFEEVVDKGASAQSFIERMTNFDKNLPNEKVLPKHSLLYEYFTVYNELTKVKYVTEGMRKPAFLSGEQKKAIVDLLFKTNRKVTVKQLKEDYFKKIECFDSVEISGVEDRFNASLGTYHDLLKIIKDKDFLDNEENEDILEDIVLTLTLFEDREMIEERLKTYAHLFDDKVMKQLKRRRYTGWGRLSRKLINGIRDKQSGKTILDFLKSDGFANRNFMQLIHDDSLTFKEDIQKAQVSGQGDSLHEHIANLAGSPAIKKGILQTVKVVDELVKVMGRHKPENIVIEMARENQTTQKGQKNSRERMKRIEEGIKELGSQILKEHPVENTQLQNEKLYLYYLQNGRDMYVDQELDINRLSDYDVDHIVPQSFLKDDSIDNKVLTRSDKNRGKSDNVPSEEVVKKMKNYWRQLLNAKLITQRKFDNLTKAERGGLSELDKAGFIKRQLVETRQITKHVAQILDSRMNTKYDENDKLIREVKVITLKSKLVSDFRKDFQFYKVREINNYHHAHAAYLNAVVGTALIKKYPKLESEFVYGDYKVYDVRKMIAKSEQEIGKATAKYFFYSNIMNFFKTEITLANGEIRKRPLIETNGETGEIVWDKGRDFATVRKVLSMPQVNIVKKTEVQTGGFSKESILPKRNSDKLIARKKDWDPKKYGGFDSPTVAYSVLVVAKVEKGKSKKLKSVKELLGITIMERSSFEKNPIDFLEAKGYKEVKKDLIIKLPKYSLFELENGRKRMLASAGELQKGNELALPSKYVNFLYLASHYEKLKGSPEDNEQKQLFVEQHKHYLDEIIEQISEFSKRVILADANLDKVLSAYNKHRDKPIREQAENIIHLFTLTNLGAPAAFKYFDTTIDRKRYTSTKEVLDATLIHQSITGLYETRIDLSQLGGD

SEQ ID NO: 67 - protein, 1368 aa, Artificial Sequence
  Synthetic
  misc_feature (840)..(840): Xaa can be any naturally occurring amino acid
MDKKYSIGLDIGTNSVGWAVITDEYKVPSKKFKVLGNTDRHSIKKNLIGALLFDSGETAEATRLKRTARRRYTRRKNRICYLQEIFSNEMAKVDDSFFHRLEESFLVEEDKKHERHPIFGNIVDEVAYHEKYPTIYHLRKKLVDSTDKADLRLIYLALAHMIKFRGHFLIEGDLNPDNSDVDKLFIQLVQTYNQLFEENPINASGVDAKAILSARLSKSRRLENLIAQLPGEKKNGLFGNLIALSLGLTPNFKSNFDLAEDAKLQLSKDTYDDDLDNLLAQIGDQYADLFLAAKNLSDAILLSDILRVNTEITKAPLSASMIKRYDEHHQDLTLLKALVRQQLPEKYKEIFFDQSKNGYAGYIDGGASQEEFYKFIKPILEKMDGTEELLVKLNREDLLRKQRTFDNGSIPHQIHLGELHAILRRQEDFYPFLKDNREKIEKILTFRIPYYVGPLARGNSRFAWMTRKSEETITPWNFEEVVDKGASAQSFIERMTNFDKNLPNEKVLPKHSLLYEYFTVYNELTKVKYVTEGMRKPAFLSGEQKKAIVDLLFKTNRKVTVKQLKEDYFKKIECFDSVEISGVEDRFNASLGTYHDLLKIIKDKDFLDNEENEDILEDIVLTLTLFEDREMIEERLKTYAHLFDDKVMKQLKRRRYTGWGRLSRKLINGIRDKQSGKTILDFLKSDGFANRNFMQLIHDDSLTFKEDIQKAQVSGQGDSLHEHIANLAGSPAIKKGILQTVKVVDELVKVMGRHKPENIVIEMARENQTTQKGQKNSRERMKRIEEGIKELGSQILKEHPVENTQLQNEKLYLYYLQNGRDMYVDQELDINRLSDYDVDXIVPQSFLKDDSIDNKVLTRSDKNRGKSDNVPSEEVVKKMKNYWRQLLNAKLITQRKFDNLTKAERGGLSELDKAGFIKRQLVETRQITKHVAQILDSRMNTKYDENDKLIREVKVITLKSKLVSDFRKDFQFYKVREINNYHHAHDAYLNAVVGTALIKKYPKLESEFVYGDYKVYDVRKMIAKSEQEIGKATAKYFFYSNIMNFFKTEITLANGEIRKRPLIETNGETGEIVWDKGRDFATVRKVLSMPQVNIVKKTEVQTGGFSKESILPKRNSDKLIARKKDWDPKKYGGFDSPTVAYSVLVVAKVEKGKSKKLKSVKELLGITIMERSSFEKNPIDFLEAKGYKEVKKDLIIKLPKYSLFELENGRKRMLASAGELQKGNELALPSKYVNFLYLASHYEKLKGSPEDNEQKQLFVEQHKHYLDEIIEQISEFSKRVILADANLDKVLSAYNKHRDKPIREQAENIIHLFTLTNLGAPAAFKYFDTTIDRKRYTSTKEVLDATLIHQSITGLYETRIDLSQLGGD

SEQ ID NO: 68 - protein, 1368 aa, Artificial Sequence
  Synthetic
MDKKYSIGLDIGTNSVGWAVITDEYKVPSKKFKVLGNTDRHSIKKNLIGALLFDSGETAEATRLKRTARRRYTRRKNRICYLQEIFSNEMAKVDDSFFHRLEESFLVEEDKKHERHPIFGNIVDEVAYHEKYPTIYHLRKKLVDSTDKADLRLIYLALAHMIKFRGHFLIEGDLNPDNSDVDKLFIQLVQTYNQLFEENPINASGVDAKAILSARLSKSRRLENLIAQLPGEKKNGLFGNLIALSLGLTPNFKSNFDLAEDAKLQLSKDTYDDDLDNLLAQIGDQYADLFLAAKNLSDAILLSDILRVNTEITKAPLSASMIKRYDEHHQDLTLLKALVRQQLPEKYKEIFFDQSKNGYAGYIDGGASQEEFYKFIKPILEKMDGTEELLVKLNREDLLRKQRTFDNGSIPHQIHLGELHAILRRQEDFYPFLKDNREKIEKILTFRIPYYVGPLARGNSRFAWMTRKSEETITPWNFEEVVDKGASAQSFIERMTNFDKNLPNEKVLPKHSLLYEYFTVYNELTKVKYVTEGMRKPAFLSGEQKKAIVDLLFKTNRKVTVKQLKEDYFKKIECFDSVEISGVEDRFNASLGTYHDLLKIIKDKDFLDNEENEDILEDIVLTLTLFEDREMIEERLKTYAHLFDDKVMKQLKRRRYTGWGRLSRKLINGIRDKQSGKTILDFLKSDGFANRNFMQLIHDDSLTFKEDIQKAQVSGQGDSLHEHIANLAGSPAIKKGILQTVKVVDELVKVMGRHKPENIVIEMARENQTTQKGQKNSRERMKRIEEGIKELGSQILKEHPVENTQLQNEKLYLYYLQNGRDMYVDQELDINRLSDYDVDAIVPQSFLKDDSIDNKVLTRSDKNRGKSDNVPSEEVVKKMKNYWRQLLNAKLITQRKFDNLTKAERGGLSELDKAGFIKRQLVETRQITKHVAQILDSRMNTKYDENDKLIREVKVITLKSKLVSDFRKDFQFYKVREINNYHHAHDAYLNAVVGTALIKKYPKLESEFVYGDYKVYDVRKMIAKSEQEIGKATAKYFFYSNIMNFFKTEITLANGEIRKRPLIETNGETGEIVWDKGRDFATVRKVLSMPQVNIVKKTEVQTGGFSKESILPKRNSDKLIARKKDWDPKKYGGFDSPTVAYSVLVVAKVEKGKSKKLKSVKELLGITIMERSSFEKNPIDFLEAKGYKEVKKDLIIKLPKYSLFELENGRKRMLASAGELQKGNELALPSKYVNFLYLASHYEKLKGSPEDNEQKQLFVEQHKHYLDEIIEQISEFSKRVILADANLDKVLSAYNKHRDKPIREQAENIIHLFTLTNLGAPAAFKYFDTTIDRKRYTSTKEVLDATLIHQSITGLYETRIDLSQLGGD

SEQ ID NO: 69 - protein, 1368 aa, Artificial Sequence
  Synthetic
  misc_feature (864)..(864): Xaa can be any naturally occurring amino acid
MDKKYSIGLDIGTNSVGWAVITDEYKVPSKKFKVLGNTDRHSIKKNLIGALLFDSGETAEATRLKRTARRRYTRRKNRICYLQEIFSNEMAKVDDSFFHRLEESFLVEEDKKHERHPIFGNIVDEVAYHEKYPTIYHLRKKLVDSTDKADLRLIYLALAHMIKFRGHFLIEGDLNPDNSDVDKLFIQLVQTYNQLFEENPINASGVDAKAILSARLSKSRRLENLIAQLPGEKKNGLFGNLIALSLGLTPNFKSNFDLAEDAKLQLSKDTYDDDLDNLLAQIGDQYADLFLAAKNLSDAILLSDILRVNTEITKAPLSASMIKRYDEHHQDLTLLKALVRQQLPEKYKEIFFDQSKNGYAGYIDGGASQEEFYKFIKPILEKMDGTEELLVKLNREDLLRKQRTFDNGSIPHQIHLGELHAILRRQEDFYPFLKDNREKIEKILTFRIPYYVGPLARGNSRFAWMTRKSEETITPWNFEEVVDKGASAQSFIERMTNFDKNLPNEKVLPKHSLLYEYFTVYNELTKVKYVTEGMRKPAFLSGEQKKAIVDLLFKTNRKVTVKQLKEDYFKKIECFDSVEISGVEDRFNASLGTYHDLLKIIKDKDFLDNEENEDILEDIVLTLTLFEDREMIEERLKTYAHLFDDKVMKQLKRRRYTGWGRLSRKLINGIRDKQSGKTILDFLKSDGFANRNFMQLIHDDSLTFKEDIQKAQVSGQGDSLHEHIANLAGSPAIKKGILQTVKVVDELVKVMGRHKPENIVIEMARENQTTQKGQKNSRERMKRIEEGIKELGSQILKEHPVENTQLQNEKLYLYYLQNGRDMYVDQELDINRLSDYDVDHIVPQSFLKDDSIDNKVLTRSDKNXGKSDNVPSEEVVKKMKNYWRQLLNAKLITQRKFDNLTKAERGGLSELDKAGFIKRQLVETRQITKHVAQILDSRMNTKYDENDKLIREVKVITLKSKLVSDFRKDFQFYKVREINNYHHAHDAYLNAVVGTALIKKYPKLESEFVYGDYKVYDVRKMIAKSEQEIGKATAKYFFYSNIMNFFKTEITLANGEIRKRPLIETNGETGEIVWDKGRDFATVRKVLSMPQVNIVKKTEVQTGGFSKESILPKRNSDKLIARKKDWDPKKYGGFDSPTVAYSVLVVAKVEKGKSKKLKSVKELLGITIMERSSFEKNPIDFLEAKGYKEVKKDLIIKLPKYSLFELENGRKRMLASAGELQKGNELALPSKYVNFLYLASHYEKLKGSPEDNEQKQLFVEQHKHYLDEIIEQISEFSKRVILADANLDKVLSAYNKHRDKPIREQAENIIHLFTLTNLGAPAAFKYFDTTIDRKRYTSTKEVLDATLIHQSITGLYETRIDLSQLGGD

SEQ ID NO: 70 - protein, 1368 aa, Artificial Sequence
  Synthetic
MDKKYSIGLDIGTNSVGWAVITDEYKVPSKKFKVLGNTDRHSIKKNLIGALLFDSGETAEATRLKRTARRRYTRRKNRICYLQEIFSNEMAKVDDSFFHRLEESFLVEEDKKHERHPIFGNIVDEVAYHEKYPTIYHLRKKLVDSTDKADLRLIYLALAHMIKFRGHFLIEGDLNPDNSDVDKLFIQLVQTYNQLFEENPINASGVDAKAILSARLSKSRRLENLIAQLPGEKKNGLFGNLIALSLGLTPNFKSNFDLAEDAKLQLSKDTYDDDLDNLLAQIGDQYADLFLAAKNLSDAILLSDILRVNTEITKAPLSASMIKRYDEHHQDLTLLKALVRQQLPEKYKEIFFDQSKNGYAGYIDGGASQEEFYKFIKPILEKMDGTEELLVKLNREDLLRKQRTFDNGSIPHQIHLGELHAILRRQEDFYPFLKDNREKIEKILTFRIPYYVGPLARGNSRFAWMTRKSEETITPWNFEEVVDKGASAQSFIERMTNFDKNLPNEKVLPKHSLLYEYFTVYNELTKVKYVTEGMRKPAFLSGEQKKAIVDLLFKTNRKVTVKQLKEDYFKKIECFDSVEISGVEDRFNASLGTYHDLLKIIKDKDFLDNEENEDILEDIVLTLTLFEDREMIEERLKTYAHLFDDKVMKQLKRRRYTGWGRLSRKLINGIRDKQSGKTILDFLKSDGFANRNFMQLIHDDSLTFKEDIQKAQVSGQGDSLHEHIANLAGSPAIKKGILQTVKVVDELVKVMGRHKPENIVIEMARENQTTQKGQKNSRERMKRIEEGIKELGSQILKEHPVENTQLQNEKLYLYYLQNGRDMYVDQELDINRLSDYDVDHIVPQSFLKDDSIDNKVLTRSDKNAGKSDNVPSEEVVKKMKNYWRQLLNAKLITQRKFDNLTKAERGGLSELDKAGFIKRQLVETRQITKHVAQILDSRMNTKYDENDKLIREVKVITLKSKLVSDFRKDFQFYKVREINNYHHAHDAYLNAVVGTALIKKYPKLESEFVYGDYKVYDVRKMIAKSEQEIGKATAKYFFYSNIMNFFKTEITLANGEIRKRPLIETNGETGEIVWDKGRDFATVRKVLSMPQVNIVKKTEVQTGGFSKESILPKRNSDKLIARKKDWDPKKYGGFDSPTVAYSVLVVAKVEKGKSKKLKSVKELLGITIMERSSFEKNPIDFLEAKGYKEVKKDLIIKLPKYSLFELENGRKRMLASAGELQKGNELALPSKYVNFLYLASHYEKLKGSPEDNEQKQLFVEQHKHYLDEIIEQISEFSKRVILADANLDKVLSAYNKHRDKPIREQAENIIHLFTLTNLGAPAAFKYFDTTIDRKRYTSTKEVLDATLIHQSITGLYETRIDLSQLGGD

SEQ ID NO: 71 - protein, 1367 aa, Artificial Sequence
  Synthetic
  misc_feature (839)..(839): Xaa can be any naturally occurring amino acid
DKKYSIGLDIGTNSVGWAVITDEYKVPSKKFKVLGNTDRHSIKKNLIGALLFDSGETAEATRLKRTARRRYTRRKNRICYLQEIFSNEMAKVDDSFFHRLEESFLVEEDKKHERHPIFGNIVDEVAYHEKYPTIYHLRKKLVDSTDKADLRLIYLALAHMIKFRGHFLIEGDLNPDNSDVDKLFIQLVQTYNQLFEENPINASGVDAKAILSARLSKSRRLENLIAQLPGEKKNGLFGNLIALSLGLTPNFKSNFDLAEDAKLQLSKDTYDDDLDNLLAQIGDQYADLFLAAKNLSDAILLSDILRVNTEITKAPLSASMIKRYDEHHQDLTLLKALVRQQLPEKYKEIFFDQSKNGYAGYIDGGASQEEFYKFIKPILEKMDGTEELLVKLNREDLLRKQRTFDNGSIPHQIHLGELHAILRRQEDFYPFLKDNREKIEKILTFRIPYYVGPLARGNSRFAWMTRKSEETITPWNFEEVVDKGASAQSFIERMTNFDKNLPNEKVLPKHSLLYEYFTVYNELTKVKYVTEGMRKPAFLSGEQKKAIVDLLFKTNRKVTVKQLKEDYFKKIECFDSVEISGVEDRFNASLGTYHDLLKIIKDKDFLDNEENEDILEDIVLTLTLFEDREMIEERLKTYAHLFDDKVMKQLKRRRYTGWGRLSRKLINGIRDKQSGKTILDFLKSDGFANRNFMQLIHDDSLTFKEDIQKAQVSGQGDSLHEHIANLAGSPAIKKGILQTVKVVDELVKVMGRHKPENIVIEMARENQTTQKGQKNSRERMKRIEEGIKELGSQILKEHPVENTQLQNEKLYLYYLQNGRDMYVDQELDINRLSDYDVDXIVPQSFLKDDSIDNKVLTRSDKNRGKSDNVPSEEVVKKMKNYWRQLLNAKLITQRKFDNLTKAERGGLSELDKAGFIKRQLVETRQITKHVAQILDSRMNTKYDENDKLIREVKVITLKSKLVSDFRKDFQFYKVREINNYHHAHDAYLNAVVGTALIKKYPKLESEFVYGDYKVYDVRKMIAKSEQEIGKATAKYFFYSNIMNFFKTEITLANGEIRKRPLIETNGETGEIVWDKGRDFATVRKVLSMPQVNIVKKTEVQTGGFSKESILPKRNSDKLIARKKDWDPKKYGGFDSPTVAYSVLVVAKVEKGKSKKLKSVKELLGITIMERSSFEKNPIDFLEAKGYKEVKKDLIIKLPKYSLFELENGRKRMLASAGELQKGNELALPSKYVNFLYLASHYEKLKGSPEDNEQKQLFVEQHKHYLDEIIEQISEFSKRVILADANLDKVLSAYNKHRDKPIREQAENIIHLFTLTNLGAPAAFKYFDTTIDRKRYTSTKEVLDATLIHQSITGLYETRIDLSQLGGD

SEQ ID NO: 72 - protein, 1367 aa, Artificial Sequence
  Synthetic
  misc_feature (863)..(863): Xaa can be any naturally occurring amino acid
DKKYSIGLDIGTNSVGWAVITDEYKVPSKKFKVLGNTDRHSIKKNLIGALLFDSGETAEATRLKRTARRRYTRRKNRICYLQEIFSNEMAKVDDSFFHRLEESFLVEEDKKHERHPIFGNIVDEVAYHEKYPTIYHLRKKLVDSTDKADLRLIYLALAHMIKFRGHFLIEGDLNPDNSDVDKLFIQLVQTYNQLFEENPINASGVDAKAILSARLSKSRRLENLIAQLPGEKKNGLFGNLIALSLGLTPNFKSNFDLAEDAKLQLSKDTYDDDLDNLLAQIGDQYADLFLAAKNLSDAILLSDILRVNTEITKAPLSASMIKRYDEHHQDLTLLKALVRQQLPEKYKEIFFDQSKNGYAGYIDGGASQEEFYKFIKPILEKMDGTEELLVKLNREDLLRKQRTFDNGSIPHQIHLGELHAILRRQEDFYPFLKDNREKIEKILTFRIPYYVGPLARGNSRFAWMTRKSEETITPWNFEEVVDKGASAQSFIERMTNFDKNLPNEKVLPKHSLLYEYFTVYNELTKVKYVTEGMRKPAFLSGEQKKAIVDLLFKTNRKVTVKQLKEDYFKKIECFDSVEISGVEDRFNASLGTYHDLLKIIKDKDFLDNEENEDILEDIVLTLTLFEDREMIEERLKTYAHLFDDKVMKQLKRRRYTGWGRLSRKLINGIRDKQSGKTILDFLKSDGFANRNFMQLIHDDSLTFKEDIQKAQVSGQGDSLHEHIANLAGSPAIKKGILQTVKVVDELVKVMGRHKPENIVIEMARENQTTQKGQKNSRERMKRIEEGIKELGSQILKEHPVENTQLQNEKLYLYYLQNGRDMYVDQELDINRLSDYDVDHIVPQSFLKDDSIDNKVLTRSDKNXGKSDNVPSEEVVKKMKNYWRQLLNAKLITQRKFDNLTKAERGGLSELDKAGFIKRQLVETRQITKHVAQILDSRMNTKYDENDKLIREVKVITLKSKLVSDFRKDFQFYKVREINNYHHAHDAYLNAVVGTALIKKYPKLESEFVYGDYKVYDVRKMIAKSEQEIGKATAKYFFYSNIMNFFKTEITLANGEIRKRPLIETNGETGEIVWDKGRDFATVRKVLSMPQVNIVKKTEVQTGGFSKESILPKRNSDKLIARKKDWDPKKYGGFDSPTVAYSVLVVAKVEKGKSKKLKSVKELLGITIMERSSFEKNPIDFLEAKGYKEVKKDLIIKLPKYSLFELENGRKRMLASAGELQKGNELALPSKYVNFLYLASHYEKLKGSPEDNEQKQLFVEQHKHYLDEIIEQISEFSKRVILADANLDKVLSAYNKHRDKPIREQAENIIHLFTLTNLGAPAAFKYFDTTIDRKRYTSTKEVLDATLIHQSITGLYETRIDLSQLGGD

SEQ ID NO: 73 - protein, 1367 aa, Artificial Sequence
  Synthetic
DKKYSIGLDIGTNSVGWAVITDEYKVPSKKFKVLGNTDRHSIKKNLIGALLFDSGETAEATRLKRTARRRYTRRKNRICYLQEIFSNEMAKVDDSFFHRLEESFLVEEDKKHERHPIFGNIVDEVAYHEKYPTIYHLRKKLVDSTDKADLRLIYLALAHMIKFRGHFLIEGDLNPDNSDVDKLFIQLVQTYNQLFEENPINASGVDAKAILSARLSKSRRLENLIAQLPGEKKNGLFGNLIALSLGLTPNFKSNFDLAEDAKLQLSKDTYDDDLDNLLAQIGDQYADLFLAAKNLSDAILLSDILRVNTEITKAPLSASMIKRYDEHHQDLTLLKALVRQQLPEKYKEIFFDQSKNGYAGYIDGGASQEEFYKFIKPILEKMDGTEELLVKLNREDLLRKQRTFDNGSIPHQIHLGELHAILRRQEDFYPFLKDNREKIEKILTFRIPYYVGPLARGNSRFAWMTRKSEETITPWNFEEVVDKGASAQSFIERMTNFDKNLPNEKVLPKHSLLYEYFTVYNELTKVKYVTEGMRKPAFLSGEQKKAIVDLLFKTNRKVTVKQLKEDYFKKIECFDSVEISGVEDRFNASLGTYHDLLKIIKDKDFLDNEENEDILEDIVLTLTLFEDREMIEERLKTYAHLFDDKVMKQLKRRRYTGWGRLSRKLINGIRDKQSGKTILDFLKSDGFANRNFMQLIHDDSLTFKEDIQKAQVSGQGDSLHEHIANLAGSPAIKKGILQTVKVVDELVKVMGRHKPENIVIEMARENQTTQKGQKNSRERMKRIEEGIKELGSQILKEHPVENTQLQNEKLYLYYLQNGRDMYVDQELDINRLSDYDVDHIVPQSFLKDDSIDNKVLTRSDKNAGKSDNVPSEEVVKKMKNYWRQLLNAKLITQRKFDNLTKAERGGLSELDKAGFIKRQLVETRQITKHVAQILDSRMNTKYDENDKLIREVKVITLKSKLVSDFRKDFQFYKVREINNYHHAHDAYLNAVVGTALIKKYPKLESEFVYGDYKVYDVRKMIAKSEQEIGKATAKYFFYSNIMNFFKTEITLANGEIRKRPLIETNGETGEIVWDKGRDFATVRKVLSMPQVNIVKKTEVQTGGFSKESILPKRNSDKLIARKKDWDPKKYGGFDSPTVAYSVLVVAKVEKGKSKKLKSVKELLGITIMERSSFEKNPIDFLEAKGYKEVKKDLIIKLPKYSLFELENGRKRMLASAGELQKGNELALPSKYVNFLYLASHYEKLKGSPEDNEQKQLFVEQHKHYLDEIIEQISEFSKRVILADANLDKVLSAYNKHRDKPIREQAENIIHLFTLTNLGAPAAFKYFDTTIDRKRYTSTKEVLDATLIHQSITGLYETRIDLSQLGGD

SEQ ID NO: 74 - protein, 1082 aa, Neisseria meningitidis
MAAFKPNSINYILGLDIGIASVGWAMVEIDEEENPIRLIDLGVRVFERAEVPKTGDSLAMARRLARSVRRLTRRRAHRLLRTRRLLKREGVLQAANFDENGLIKSLPNTPWQLRAAALDRKLTPLEWSAVLLHLIKHRGYLSQRKNEGETADKELGALLKGVAGNAHALQTGDFRTPAELALNKFEKESGHIRNQRSDYSHTFSRKDLQAELILLFEKQKEFGNPHVSGGLKEGIETLLMTQRPALSGDAVQKMLGHCTFEPAEPKAAKNTYTAERFIWLTKLNNLRILEQGSERPLTDTERATLMDEPYRKSKLTYAQARKLLGLEDTAFFKGLRYGKDNAEASTLMEMKAYHAISRALEKEGLKDKKSPLNLSPELQDEIGTAFSLFKTDEDITGRLKDRIQPEILEALLKHISFDKFVQISLKALRRIVPLMEQGKRYDEACAEIYGDHYGKKNTEEKIYLPPIPADEIRNPVVLRALSQARKVINGVVRRYGSPARIHIETAREVGKSFKDRKEIEKRQEENRKDREKAAAKFREYFPNFVGEPKSKDILKLRLYEQQHGKCLYSGKEINLGRLNEKGYVEIDAALPFSRTWDDSFNNKVLVLGSENQNKGNQTPYEYFNGKDNSREWQEFKARVETSRFPRSKKQRILLQKFDEDGFKERNLNDTRYVNRFLCQFVADRMRLTGKGKKRVFASNGQITNLLRGFWGLRKVRAENDRHHALDAVVVACSTVAMQQKITRFVRYKEMNAFDGKTIDKETGEVLHQKTHFPQPWEFFAQEVMIRVFGKPDGKPEFEEADTLEKLRTLLAEKLSSRPEAVHEYVTPLFVSRAPNRKMSGQGHMETVKSAKRLDEGVSVLRVPLTQLKLKDLEKMVNREREPKLYEALKARLEAHKDDPAKAFAEPFYKYDKAGNRTQQVKAVRVEQVQKTGVWVRNHNGIADNATMVRVDVFEKGDKYYLVPIYSWQVAKGILPDRAVVQGKDEEDWQLIDDSFNFKFSLHPNDLVEVITKKARMFGYFASCHRGTGNINIRIHDLDHKIGKNGILEGIGVKTALSFQKYQIDELGKEIRPCRLKKRPPVR

SEQ ID NO: 75 - protein, 984 aa, Campylobacter jejuni
MARILAFDIGISSIGWAFSENDELKDCGVRIFTKVENPKTGESLALPRRLARSARKRLARRKARLNHLKHLIANEFKLNYEDYQSFDESLAKAYKGSLISPYELRFRALNELLSKQDFARVILHIAKRRGYDDIKNSDDKEKGAILKAIKQNEEKLANYQSVGEYLYKEYFQKFKENSKEFTNVRNKKESYERCIAQSFLKDELKLIFKKQREFGFSFSKKFEEEVLSVAFYKRALKDFSHLVGNCSFFTDEKRAPKNSPLAFMFVALTRIINLLNNLKNTEGILYTKDDLNALLNEVLKNGTLTYKQTKKLLGLSDDYEFKGEKGTYFIEFKKYKEFIKALGEHNLSQDDLNEIAKDITLIKDEIKLKKALAKYDLNQNQIDSLSKLEFKDHLNISFKALKLVTPLMLEGKKYDEACNELNLKVAINEDKKDFLPAFNETYYKDEVTNPVVLRAIKEYRKVLNALLKKYGKVHKINIELAREVGKNHSQRAKIEKEQNENYKAKKDAELECEKLGLKINSKNILKLRLFKEQKEFCAYSGEKIKISDLQDEKMLEIDHIYPYSRSFDDSYMNKVLVFTKQNQEKLNQTPFEAFGNDSAKWQKIEVLAKNLPTKKQKRILDKNYKDKEQKNFKDRNLNDTRYIARLVLNYTKDYLDFLPLSDDENTKLNDTQKGSKVHVEAKSGMLTSALRHTWGFSAKDRNNHLHHAIDAVIIAYANNSIVKAFSDFKKEQESNSAELYAKKISELDYKNKRKFFEPFSGFRQKVLDKIDEIFVSKPERKKPSGALHEETFRKEEEFYQSYGGKEGVLKALELGKIRKVNGKIVKNGDMFRVDIFKHKKTNKFYAVPIYTMDFALKVLPNKAVARSKKGEIKDWILMDENYEFCFSLYKDSLILIQTKDMQEPEFVYYNAFTSSTVSLIVSKHDNKFETLSKNQKILFKNANEKEVIAKSIGIQNLKVFEKYIVSALGEVTKAEFRQREDFKK

SEQ ID NO: 76 - protein, 1087 aa, Geobacillus stearothermophilus
MRYKIGLDIGITSVGWAVMNLDIPRIEDLGVRIFDRAENPQTGESLALPRRLARSARRRLRRRKHRLERIRRLVIREGILTKEELDKLFEEKHEIDVWQLRVEALDRKLNNDELARVLLHLAKRRGFKSNRKSERSNKENSTMLKHIEENRAILSSYRTVGEMIVKDPKFALHKRNKGENYTNTIARDDLEREIRLIFSKQREFGNMSCTEEFENEYITIWASQRPVASKDDIEKKVGFCTFEPKEKRAPKATYTFQSFIAWEHINKLRLISPSGARGLTDEERRLLYEQAFQKNKITYHDIRTLLHLPDDTYFKGIVYDRGESRKQNENIRFLELDAYHQIRKAVDKVYGKGKSSSFLPIDFDTFGYALTLFKDDADIHSYLRNEYEQNGKRMPNLANKVYDNELIEELLNLSFTKFGHLSLKALRSILPYMEQGEVYSSACERAGYTFTGPKKKQKTMLLPNIPPIANPVVMRALTQARKVVNAIIKKYGSPVSIHIELARDLSQTFDERRKTKKEQDENRKKNETAIRQLMEYGLTLNPTGHDIVKFKLWSEQNGRCAYSLQPIEIERLLEPGYVEVDHVIPYSRSLDDSYTNKVLVLTRENREKGNRIPAEYLGVGTERWQQFETFVLTNKQFSKKKRDRLLRLHYDENEETEFKNRNLNDTRYISRFFANFIREHLKFAESDDKQKVYTVNGRVTAHLRSRWEFNKNREESDLHHAVDAVIVACTTPSDIAKVTAFYQRREQNKELAKKTEPHFPQPWPHFADELRARLSKHPKESIKALNLGNYDDQKLESLQPVFVSRMPKRSVTGAAHQETLRRYVGIDERSGKIQTVVKTKLSEIKLDASGHFPMYGKESDPRTYEAIRQRLLEHNNDPKKAFQEPLYKPKKNGEPGPVIRTVKIIDTKNQVIPLNDGKTVAYNSNIVRVDVFEKDGKYYCVPVYTMDIMKGILPNKAIEPNKPYSEWKEMTEDYTFRFSLYPNDLIRIELPREKTVKTAAGEEINVKDVFVYYKTIDSANGGLELISHDHRFSLRGVGSRTLKRFEKYQVDVLGNIYKVRGEKRVGLASSAHSKPGKTIRPLQSTRD

SEQ ID NO: 77 - protein, 1228 aa, Unknown
  Lachnospiraceae bacterium
MSKLEKFTNCYSLSKTLRFKAIPVGKTQENIDNKRLLVEDEKRAEDYKGVKKLLDRYYLSFINDVLHSIKLKNLNNYISLFRKKTRTEKENKELENLEINLRKEIAKAFKGNEGYKSLFKKDIIETILPEFLDDKDEIALVNSFNGFTTAFTGFFDNRENMFSEEAKSTSIAFRCINENLTRYISNMDIFEKVDAIFDKHEVQEIKEKILNSDYDVEDFFEGEFFNFVLTQEGIDVYNAIIGGFVTESGEKIKGLNEYINLYNQKTKQKLPKFKPLYKQVLSDRESLSFYGEGYTSDEEVLEVFRNTLNKNSEIFSSIKKLEKLFKNFDEYSSAGIFVKNGPAISTISKDIFGEWNVIRDKWNAEYDDIHLKKKAVVTEKYEDDRRKSFKKIGSFSLEQLQEYADADLSVVEKLKEIIIQKVDEIYKVYGSSEKLFDADFVLEKSLKKNDAVVAIMKDLLDSVKSFENYIKAFFGEGKETNRDESFYGDFVLAYDILLKVDHIYDAIRNYVTQKPYSKDKFKLYFQNPQFMGGWDKDKETDYRATILRYGSKYYLAIMDKKYAKCLQKIDKDDVNGNYEKINYKLLPGPNKMLPKVFFSKKWMAYYNPSEDIQKIYKNGTFKKGDMFNLNDCHKLIDFFKDSISRYPKWSNAYDFNFSETEKYKDIAGFYREVEEQGYKVSFESASKKEVDKLVEEGKLYMFQIYNKDFSDKSHGTPNLHTMYFKLLFDENNHGQIRLSGGAELFMRRASLKKEELVVHPANSPIANKNPDNPKKTTTLSYDVYKDKRFSEDQYELHIPIAINKCPKNIFKINTEVRVLLKHDDNPYVIGIDRGERNLLYIVVVDGKGNIVEQYSLNEIINNFNGIRIKTDYHSLLDKKEKERFEARQNWTSIENIKELKAGYISQVVHKICELVEKYDAVIALEDLNSGFKNSRVKVEKQVYQKFEKMLIDKLNYMVDKKSNPCATGGALKGYQITNKFESFKSMSTQNGFIFYIPAWLTSKIDPSTGFVNLLKTKYTSIADSKKFISSFDRIMYVPEEDLFEFALDYKNFSRTDADYIKKWKLYSYGNRIRIFRNPKKNNVFDWEEVCLTSAYKELFNKYGINYQQGDIRALLCEQSDKAFYSSFMALMSLMLQMRNSITGRTDVDFLISPVKNSDGIFYDSRNYEAQENAILPKNADANGAYNIARKVLWAIGQFKKAEDEKLDKVKIAISNKEWLEYAQTSVKH

SEQ ID NO: 78 - protein, 1108 aa, Unknown
  Bacillus hisashii
MATRSFILKIEPNEEVKKGLWKTHEVLNHGIAYYMNILKLIRQEAIYEHHEQDPKNPKKVSKAEIQAELWDFVLKMQKCNSFTHEVDKDEVFNILRELYEELVPSSVEKKGEANQLSNKFLYPLVDPNSQSGKGTASSGRKPRWYNLKIAGDPSWEEEKKKWEEDKKKDPLAKILGKLAEYGLIPLFIPYTDSNEPIVKEIKWMEKSRNQSVRRLDKDMFIQALERFLSWESWNLKVKEEYEKVEKEYKTLEERIKEDIQALKALEQYEKERQEQLLRDTLNTNEYRLSKRGLRGWREIIQKWLKMDENEPSEKYLEVFKDYQRKHPREAGDYSVYEFLSKKENHFIWRNHPEYPYLYATFCEIDKKKKDAKQQATFTLADPINHPLWVRFEERSGSNLNKYRILTEQLHTEKLKKKLTVQLDRLIYPTESGGWEEKGKVDIVLLPSRQFYNQIFLDIEEKGKHAFTYKDESIKFPLKGTLGGARVQFDRDHLRRYPHKVESGNVGRIYFNMTVNIEPTESPVSKSLKIHRDDFPKVVNFKPKELTEWIKDSKGKKLKSGIESLEIGLRVMSIDLGQRQAAAASIFEVVDQKPDIEGKLFFPIKGTELYAVHRASFNIKLPGETLVKSREVLRKAREDNLKLMNQKLNFLRNVLHFQQFEDITEREKRVTKWISRQENSDVPLVYQDELIQIRELMYKPYKDWVAFLKQLHKRLEVEIGKEVKHWRKSLSDGRKGLYGISLKNIDEIDRTRKFLLRWSLRPTEPGEVRRLEPGQRFAIDQLNHLNALKEDRLKKMANTIIMHALGYCYDVRKKKWQAKNPACQIILFEDLSNYNPYEERSRFENSKLMKWSRREIPRQVALQGEIYGLQVGEVGAQFSSRFHAKTGSPGIRCSVVTKEKLQDNRFFKNLQREGRLTLDKIAVLKEGDLYPDKGGEKFISLSKDRKCVTTHADINAAQNLQKRFWTRTHGFYKVYCKAYQVDGQTVYIPESKDQKQKIIEEFGEGYFILKDGVYEWVNAGKLKIKKGSSKQSSSELVDSDILKDSFDLASELKGEKLMLYRDPSGNVFPSDKWMAAGVFFGKLERILISKLTNQYSISTIEDDSSKQSM

SEQ ID NO: 79 - protein, 1307 aa, Unknown
  Acidaminococcus sp. (strain BV3L6)
MTQFEGFTNLYQVSKTLRFELIPQGKTLKHIQEQGFIEEDKARNDHYKELKPIIDRIYKTYADQCLQLVQLDWENLSAAIDSYRKEKTEETRNALIEEQATYRNAIHDYFIGRTDNLTDAINKRHAEIYKGLFKAELFNGKVLKQLGTVTTTEHENALLRSFDKFTTYFSGFYENRKNVFSAEDISTAIPHRIVQDNFPKFKENCHIFTRLITAVPSLREHFENVKKAIGIFVSTSIEEVFSFPFYNQLLTQTQIDLYNQLLGGISREAGTEKIKGLNEVLNLAIQKNDETAHIIASLPHRFIPLFKQILSDRNTLSFILEEFKSDEEVIQSFCKYKTLLRNENVLETAEALFNELNSIDLTHIFISHKKLETISSALCDHWDTLRNALYERRISELTGKITKSAKEKVQRSLKHEDINLQEIISAAGKELSEAFKQKTSEILSHAHAALDQPLPTTLKKQEEKEILKSQLDSLLGLYHLLDWFAVDESNEVDPEFSARLTGIKLEMEPSLSFYNKARNYATKKPYSVEKFKLNFQMPTLASGWDVNKEKNNGAILFVKNGLYYLGIMPKQKGRYKALSFEPTEKTSEGFDKMYYDYFPDAAKMIPKCSTQLKAVTAHFQTHTTPILLSNNFIEPLEITKEIYDLNNPEKEPKKFQTAYAKKTGDQKGYREALCKWIDFTRDFLSKYTKTTSIDLSSLRPSSQYKDLGEYYAELNPLLYHISFQRIAEKEIMDAVETGKLYLFQIYNKDFAKGHHGKPNLHTLYWTGLFSPENLAKTSIKLNGQAELFYRPKSRMKRMAHRLGEKMLNKKLKDQKTPIPDTLYQELYDYVNHRLSHDLSDEARALLPNVITKEVSHEIIKDRRFTSDKFFFHVPITLNYQAANSPSKFNQRVNAYLKEHPETPIIGIDRGERNLIYITVIDSTGKILEQRSLNTIQQFDYQKKLDNREKERVAARQAWSVVGTIKDLKQGYLSQVIHEIVDLMIHYQAVVVLENLNFGFKSKRTGIAEKAVYQQFEKMLIDKLNCLVLKDYPAEKVGGVLNPYQLTDQFTSFAKMGTQSGFLFYVPAPYTSKIDPLTGFVDPFVWKTIKNHESRKHFLEGFDFLHYDVKTGDFILHFKMNRNLSFQRGLPGFMPAWDIVFEKNETQFDAKGTPFIAGKRIVPVIENHRFTGRYRDLYPANELIALLEEKGIVFRDGSNILPKLLENDDSHAIDTMVALIRSVLQMRNSNAATGEDYINSPVRDLNGVCFDSRFQNPEWPMDADANGAYHIALKGQLLLNHLKESKDLKLQNGISNQDWLAYIQELRN

SEQ ID NO: 80 - protein, 1307 aa, Artificial Sequence
  Synthetic
MTQFEGFTNLYQVSKTLRFELIPQGKTLKHIQEQGFIEEDKARNDHYKELKPIIDRIYKTYADQCLQLVQLDWENLSAAIDSYRKEKTEETRNALIEEQATYRNAIHDYFIGRTDNLTDAINKRHAEIYKGLFKAELFNGKVLKQLGTVTTTEHENALLRSFDKFTTYFSGFYENRKNVFSAEDISTAIPHRIVQDNFPKFKENCHIFTRLITAVPSLREHFENVKKAIGIFVSTSIEEVFSFPFYNQLLTQTQIDLYNQLLGGISREAGTEKIKGLNEVLNLAIQKNDETAHIIASLPHRFIPLFKQILSDRNTLSFILEEFKSDEEVIQSFCKYKTLLRNENVLETAEALFNELNSIDLTHIFISHKKLETISSALCDHWDTLRNALYERRISELTGKITKSAKEKVQRSLKHEDINLQEIISAAGKELSEAFKQKTSEILSHAHAALDQPLPTTLKKQEEKEILKSQLDSLLGLYHLLDWFAVDESNEVDPEFSARLTGIKLEMEPSLSFYNKARNYATKKPYSVEKFKLNFQMPTLASGWDVNKEKNNGAILFVKNGLYYLGIMPKQKGRYKALSFEPTEKTSEGFDKMYYDYFPDAAKMIPKCSTQLKAVTAHFQTHTTPILLSNNFIEPLEITKEIYDLNNPEKEPKKFQTAYAKKTGDQKGYREALCKWIDFTRDFLSKYTKTTSIDLSSLRPSSQYKDLGEYYAELNPLLYHISFQRIAEKEIMDAVETGKLYLFQIYNKDFAKGHHGKPNLHTLYWTGLFSPENLAKTSIKLNGQAELFYRPKSRMKRMAHRLGEKMLNKKLKDQKTPIPDTLYQELYDYVNHRLSHDLSDEARALLPNVITKEVSHEIIKDRRFTSDKFFFHVPITLNYQAANSPSKFNQRVNAYLKEHPETPIIGIDRGERNLIYITVIDSTGKILEQRSLNTIQQFDYQKKLDNREKERVAARQAWSVVGTIKDLKQGYLSQVIHEIVDLMIHYQAVVVLENLNFGFKSKRTGIAEKAVYQQFEKMLIDKLNCLVLKDYPAEKVGGVLNPYQLTDQFTSFAKMGTQSGFLFYVPAPYTSKIDPLTGFVDPFVWKTIKNHESRKHFLEGFDFLHYDVKTGDFILHFKMNRNLSFQRGLPGFMPAWDIVFEKNETQFDAKGTPFIAGKRIVPVIENHRFTGRYRDLYPANELIALLEEKGIVFRDGSNILPKLLENDDSHAIDTMVALIRSVLQMANSNAATGEDYINSPVRDLNGVCFDSRFQNPEWPMDADANGAYHIALKGQLLLNHLKESKDLKLQNGISNQDWLAYIQELRN

SEQ ID NO: 81 - protein, 1259 aa, Unknown
  Lachnospiraceae bacterium
MNYKTGLEDFIGKESLSKTLRNALIPTESTKIHMEEMGVIRDDELRAEKQQELKEIMDDYYRTFIEEKLGQIQGIQWNSLFQKMEETMEDISVRKDLDKIQNEKRKEICCYFTSDKRFKDLFNAKLITDILPNFIKDNKEYTEEEKAEKEQTRVLFQRFATAFTNYFNQRRNNFSEDNISTAISFRIVNENSEIHLQNMRAFQRIEQQYPEEVCGMEEEYKDMLQEWQMKHIYSVDFYDRELTQPGIEYYNGICGKINEHMNQFCQKNRINKNDFRMKKLHKQILCKKSSYYEIPFRFESDQEVYDALNEFIKTMKKKEIIRRCVHLGQECDDYDLGKIYISSNKYEQISNALYGSWDTIRKCIKEEYMDALPGKGEKKEEKAEAAAKKEEYRSIADIDKIISLYGSEMDRTISAKKCITEICDMAGQISIDPLVCNSDIKLLQNKEKTTEIKTILDSFLHVYQWGQTFIVSDIIEKDSYFYSELEDVLEDFEGITTLYNHVRSYVTQKPYSTVKFKLHFGSPTLANGWSQSKEYDNNAILLMRDQKFYLGIFNVRNKPDKQIIKGHEKEEKGDYKKMIYNLLPGPSKMLPKVFITSRSGQETYKPSKHILDGYNEKRHIKSSPKFDLGYCWDLIDYYKECIHKHPDWKNYDFHFSDTKDYEDISGFYREVEMQGYQIKWTYISADEIQKLDEKGQIFLFQIYNKDFSVHSTGKDNLHTMYLKNLFSEENLKDIVLKLNGEAELFFRKASIKTPIVHKKGSVLVNRSYTQTVGNKEIRVSIPEEYYTEIYNYLNHIGKGKLSSEAQRYLDEGKIKSFTATKDIVKNYRYCCDHYFLHLPITINFKAKSDVAVNERTLAYIAKKEDIHIIGIDRGERNLLYISVVDVHGNIREQRSFNIVNGYDYQQKLKDREKSRDAARKNWEEIEKIKELKEGYLSMVIHYIAQLVVKYNAVVAMEDLNYGFKTGRFKVERQVYQKFETMLIEKLHYLVFKDREVCEEGGVLRGYQLTYIPESLKKVGKQCGFIFYVPAGYTSKIDPTTGFVNLFSFKNLTNRESRQDFVGKFDEIRYDRDKKMFEFSFDYNNYIKKGTILASTKWKVYTNGTRLKRIVVNGKYTSQSMEVELTDAMEKMLQRAGIEYHDGKDLKGQIVEKGIEAEIIDIFRLTVQMRNSRSESEDREYDRLISPVLNDKGEFFDTATADKTLPQDADANGAYCIALKGLYEVKQIKENWKENEQFPRNKLVQDNKTWFDFMQKKRYL

SEQ ID NO: 82 - protein, 1306 aa, Prevotella copri
MAKNFEDFKRLYSLSKTLRFEAKPIGATLDNIVKSGLLDEDEHRAASYVKVKKLIDEYHKVFIDRVLDDGCLPLENKGNNNSLAEYYESYVSRAQDEDAKKKFKEIQQNLRSVIAKKLTEDKAYANLFGNKLIESYKDKEDKKKIIDSDLIQFINTAESTQLDSMSQDEAKELVKEFWGFVTYFYGFFDNRKNMYTAEEKSTGIAYRLVNENLPKFIDNIEAFNRAITRPEIQENMGVLYSDFSEYLNVESIQEMFQLDYYNMLLTQKQIDVYNAIIGGKTDDEHDVKIKGINEYINLYNQQHKDDKLPKLKALFKQILSDRNAISWLPEEFNSDQEVLNAIKDCYERLAENVLGDKVLKSLLGSLADYSLDGIFIRNDLQLTDISQKMFGNWGVIQNAIMQNIKRVAPARKHKESEEDYEKRIAGIFKKADSFSISYINDCLNEADPNNAYFVENYFATFGAVNTPTMQRENLFALVQNAYTEVAALLHSDYPTVKHLAQDKANVSKIKALLDAIKSLQHFVKPLLGKGDESDKDERFYGELASLWAELDTVTPLYNMIRNYMTRKPYSQKKIKLNFENPQLLGGWDANKEKDYATIILRRNGLYYLAIMDKDSRKLLGKAMPSDGECYEKMVYKFFKDVTTMIPKCSTQLKDVQAYFKVNTDDYVLNSKAFNKPLTITKEVFDLNNVLYGKYKKFQKGYLTATGDNVGYTHAVNVWIKFCMDFLNSYDSTCIYDFSSLKPESYLSLDAFYQDANLLLYKLSFARASVSYINQLVEEGKMYLFQIYNKDFSEYSKGTPNMHTLYWKALFDERNLADVVYKLNGQAEMFYRKKSIENTHPTHPANHPILNKNKDNKKKESLFDYDLIKDRRYTVDKFMFHVPITMNFKSVGSENINQDVKAYLRHADDMHIIGIDRGERHLLYLVVIDLQGNIKEQYSLNEIVNEYNGNTYHTNYHDLLDVREEERLKARQSWQTIENIKELKEGYLSQVIHKITQLMVRYHAIVVLEDLSKGFMRSRQKVEKQVYQKFEKMLIDKLNYLVDKKTDVSTPGGLLNAYQLTCKSDSSQKLGKQSGFLFYIPAWNTSKIDPVTGFVNLLDTHSLNSKEKIKAFFSKFDAIRYNKDKKWFEFNLDYDKFGKKAEDTRTKWTLCTRGMRIDTFRNKEKNSQWDNQEVDLTTEMKSLLEHYYIDIHGNLKDAISAQTDKAFFTGLLHILKLTLQMRNSITGTETDYLVSPVADENGIFYDSRSCGNQLPENADANGAYNIARKGLMLIEQIKNAEDLNNVKFDISNKAWLNFAQQKPYKNG

SEQ ID NO: 83 - protein, 1142 aa, Eubacterium rectale
MFSAKLISDILPEFVIHNNNYSASEKEEKTQVIKLFSRFATSFKDYFKNRANCFSANDISSSSCHRIVNDNAEIFFSNALVYRRIVKNLSNDDINKISGDMKDSLKEMSLEEIYSYEKYGEFITQEGISFYNDICGKVNLFMNLYCQKNKENKNLYKLRKLHKQILCIADTSYEVPYKFESDEEVYQSVNGFLDNISSKHIVERLRKIGENYNGYNLDKIYIVSKFYESVSQKTYRDWETINTALEIHYNNILPGNGKSKADKVKKAVKNDLQKSITEINELVSNYKLCPDDNIKAETYIHEISHILNNFEAQELKYNPEIHLVESELKASELKNVLDVIMNAFHWCSVFMTEELVDKDNNFYAELEEIYDEIYPVISLYNLVRNYVTQKPYSTKKIKLNFGIPTLADGWSKSKEYSNNAIILMRDNLYYLGIFNAKNKPDKKIIEGNTSENKGDYKKMIYNLLPGPNKMIPKVFLSSKTGVETYKPSAYILEGYKQNKHLKSSKDFDITFCHDLIDYFKNCIAIHPEWKNFGFDFSDTSTYEDISGFYREVELQGYKIDWTYISEKDIDLLQEKGQLYLFQIYNKDFSKKSSGNDNLHTMYLKNLFSEENLKDIVLKLNGEAEIFFRKSSIKNPIIHKKGSILVNRTYEAEEKDQFGNIQIVRKTIPENIYQELYKYFNDKSDKELSDEAAKLKNVVGHHEAATNIVKDYRYTYDKYFLHMPITINFKANKTSFINDRILQYIAKEKDLHVIGIDRGERNLIYVSVIDTCGNIVEQKSFNIVNGYDYQIKLKQQEGARQIARKEWKEIGKIKEIKEGYLSLVIHEISKMVIKYNAIIAMEDLSYGFKKGRFKVERQVYQKFETMLINKLNYLVFKDISITENGGLLKGYQLTYIPDKLKNVGHQCGCIFYVPAAYTSKIDPTTGFVNIFKFKDLTVDAKREFIKKFDSIRYDSDKNLFCFTFDYNNFITQNTVMSKSSWSVYTYGVRIKRRFVNGRFSNESDTIDITKDMEKTLEMTDINWRDGHDLRQDIIDYEIVQHIFEIFKLTVQMRNSLSELEDRDYDRLISPVLNENNIFYDSAKAGDALPKDADANGAYCIALKGLYEIKQITENWKEDGKFSRDKLKISNKDWFDFIQNKRYL

SEQ ID NO: 84 - protein, 1259 aa, Unknown
  Clostridium sp. AF34-10BH
MNYKTGLEDFIGKESLSKTLRNALIPTESTKIHMEEMGVIRDDELRAEKQQELKEIMDDYYRAFIEEKLGQIQGIQWNSLFQKMEETMEDISVRKDLDKIQNEKRKEICCYFTSDKRFKDLFNAKLITDILPNFIKDNKEYTEEEKAEKEQTRVLFQRFATAFTNYFNQRRNNFSEDNISTAISFRIVNENSEIHLQNMRAFQRIEQQYPEEVCGMEEEYKDMLQEWQMKHIYLVDFYDRVLTQPGIEYYNGICGKINEHMNQFCQKNRINKNDFRMKKLHKQILCKKSSYYEIPFRFESDQEVYDALNEFIKTMKEKEIICRCVHLGQKCDDYDLGKIYISSNKYEQISNALYGSWDTIRKCIKEEYMDALPGKGEKKEEKAEAAAKKEEYRSIADIDKIISLYGSEMDRTISAKKCITEICDMAGQISTDPLVCNSDIKLLQNKEKTTEIKTILDSFLHVYQWGQTFIVSDIIEKDSYFYSELEDVLEDFEGITTLYNHVRSYVTQKPYSTVKFKLHFGSPTLANGWSQSKEYDNNAILLMRDQKFYLGIFNVRNKPDKQIIKGHEKEEKGDYKKMIYNLLPGPSKMLPKVFITSRSGQETYKPSKHILDGYNEKRHIKSSPKFDLGYCWDLIDYYKECIHKHPDWKNYDFHFSDTKDYEDISGFYREVEMQGYQIKWTYISADEIQKLDEKGQIFLFQIYNKDFSVHSTGKDNLHTMYLKNLFSEENLKDIVLKLNGEAELFFRKASIKTPVVHKKGSVLVNRSYTQTVGDKEIRVSIPEEYYTEIYNYLNHIGRGKLSTEAQRYLEERKIKSFTATKDIVKNYRYCCDHYFLHLPITINFKAKSDIAVNERTLAYIAKKEDIHIIGIDRGERNLLYISVVDVHGNIREQRSFNIVNGYDYQQKLKDREKSRDAARKNWEEIEKIKELKEGYLSMVIHYIAQLVVKYNAVVAMEDLNYGFKTGRFKVERQVYQKFETMLIEKLHYLVFKDREVCEEGGVLRGYQLTYIPESLKKVGKQCGFIFYVPAGYTSKIDPTTGFVNLFSFKNLTNRESRQDFVGKFDEIRYDRDKKMFEFSFDYNNYIKKGTMLASTKWKVYTNGTRLKRIVVNGKYTSQSMEVELTDAMEKMLQRAGIEYHDGKDLKGQIVEKGIEAEIIDIFRLTVQMRNSRSESEDREYDRLISPVLNDKGEFFDTATADKTLPQDADANGAYCIALKGLYEVKQIKENWKENEQFPRNKLVQDNKTWFDFMQKKRYL

SEQ ID NO: 85 - protein, 1465 aa, Thermomonas hydrothermalis
MSEKTTQRAYTLRLNRASGECAVCQNNSCDCWHDALWATHKAVNRGAKAFGDWLLTLRGGLCHTLVEMEVPAKGNNPPQRPTDQERRDRRVLLALSWLSVEDEHGAPKEFIVATGRDSADDRAKKVEEKLREILEKRDFQEHEIDAWLQDCGPSLKAHIREDAVWVNRRALFDAAVERIKTLTWEEAWDFLEPFFGTQYFAGIGDGKDKDDAEGPARQGEKAKDLVQKAGQWLSARFGIGTGADFMSMAEAYEKIAKWASQAQNGDNGKATIEKLACALRPSEPPTLDTVLKCISGPGHKSATREYLKTLDKKSTVTQEDLNQLRKLADEDARNCRKKVGKKGKKPWADEVLKDVENSCELTYLQDNSPARHREFSVMLDHAARRVSMAHSWIKKAEQRRRQFESDAQKLKNLQERAPSAVEWLDRFCESRSMTTGANTGSGYRIRKRAIEGWSYVVQAWAEASCDTEDKRIAAARKVQADPEIEKFGDIQLFEALAADEAICVWRDQEGTQNPSILIDYVTGKTAEHNQKRFKVPAYRHPDELRHPVFCDFGNSRWSIQFAIHKEIRDRDKGAKQDTRQLQNRHGLKMRLWNGRSMTDVNLHWSSKRLTADLALDQNPNPNPTEVTRADRLGRAASSAFDHVKIKNVFNEKEWNGRLQAPRAELDRIAKLEEQGKTEQAEKLRKRLRWYVSFSPCLSPSGPFIVYAGQHNIQPKRSGQYAPHAQANKGRARLAQLILSRLPDLRILSVDLGHRFAAACAVWETLSSDAFRREIQGLNVLAGGSGEGDLFLHVEMTGDDGKRRTVVYRRIGPDQLLDNTPHPAPWARLDRQFLIKLQGEDEGVREASNEELWTVHKLEVEVGRTVPLIDRMVRSGFGKTEKQKERLKKLRELGWISAMPNEPSAETDEKEGEIRSISRSVDELMSSALGTLRLALKRHGNRARIAFAMTADYKPMPGGQKYYFHEAKEASKNDDETKRRDNQIEFLQDALSLWHDLFSSPDWEDNEAKKLWQNHIATLPNYQTPEEISAELKRVERNKKRKENRDKLRTAAKALAENDQLRQHLHDTWKERWESDDQQWKERLRSLKDWIFPRGKAEDNPSIRHVGGLSITRINTISGLYQILKAFKMRPEPDDLRKNIPQKGDDELENFNRRLLEARDRLREQRVKQLASRIIEAALGVGRIKIPKNGKLPKRPRTTVDTPCHAVVIESLKTYRPDDLRTRRENRQLMQWSSAKVRKYLKEGCELYGLHFLEVPANYTSRQCSRTGLPGIRCDDVPTGDFLKAPWWRRAINTAREKNGGDAKDRFLVDLYDHLNNLQSKGEALPATVRVPRQGGNLFIAGAQLDDTNKERRAIQADLNAAANIGLRALLDPDWRGRWWYVPCKDGTSEPALDRIEGSTAFNDVRSLPTGDNSSRRAPREIENLWRDPSGDSLESGTWSPTRAYWDTVQSRVIELLRRHAGLPTS

SEQ ID NO: 86 - protein, 1090 aa, Laceyella sacchari
MSIRSFKLKLKTKSGVNAEQLRRGLWRTHQLINDGIAYYMNWLVLLRQEDLFIRNKETNEIEKRSKEEIQAVLLERVHKQQQRNQWSGEVDEQTLLQALRQLYEEIVPSVIGKSGNASLKARFFLGPLVDPNNKTTKDVSKSGPTPKWKKMKDAGDPNWVQEYEKYMAERQTLVRLEEMGLIPLFPMYTDEVGDIHWLPQASGYTRTWDRDMFQQAIERLLSWESWNRRVRERRAQFEKKTHDFASRFSESDVQWMNKLREYEAQQEKSLEENAFAPNEPYALTKKALRGWERVYHSWMRLDSAASEEAYWQEVATCQTAMRGEFGDPAIYQFLAQKENHDIWRGYPERVIDFAELNHLQRELRRAKEDATFTLPDSVDHPLWVRYEAPGGTNIHGYDLVQDTKRNLTLILDKFILPDENGSWHEVKKVPFSLAKSKQFHRQVWLQEEQKQKKREVVFYDYSTNLPHLGTLAGAKLQWDRNFLNKRTQQQIEETGEIGKVFFNISVDVRPAVEVKNGRLQNGLGKALTVLTHPDGTKIVTGWKAEQLEKWVGESGRVSSLGLDSLSEGLRVMSIDLGQRTSATVSVFEITKEAPDNPYKFFYQLEGTEMFAVHQRSFLLALPGENPPQKIKQMREIRWKERNRIKQQVDQLSAILRLHKKVNEDERIQAIDKLLQKVASWQLNEEIATAWNQALSQLYSKAKENDLQWNQAIKNAHHQLEPVVGKQISLWRKDLSTGRQGIAGLSLWSIEELEATKKLLTRWSKRSREPGVVKRIERFETFAKQIQHHINQVKENRLKQLANLIVMTALGYKYDQEQKKWIEVYPACQVVLFENLRSYRFSFERSRRENKKLMEWSHRSIPKLVQMQGELFGLQVADVYAAYSSRYHGRTGAPGIRCHALTEADLRNETNIIHELIEAGFIKEEHRPYLQQGDLVPWSGGELFATLQKPYDNPRILTLHADINAAQNIQKRFWHPSMWFRVNCESVMEGEIVTYVPKNKTVHKKQGKTFRFVKVEGSDVYEWAKWSKNRNKNTFSSITERKPPSSMILFRDPSGTFFKEQEWVEQKTFWGKVQSMIQAYMKKTIVQRMEE

SEQ ID NO: 87 - protein, 1194 aa, Dsulfonatronum thiodismutans
MVLGRKDDTAELRRALWTTHEHVNLAVAEVERVLLRCRGRSYWTLDRRGDPVHVPESQVAEDALAMAREAQRRNGWPVVGEDEEILLALRYLYEQIVPSCLLDDLGKPLKGDAQKIGTNYAGPLFDSDTCRRDEGKDVACCGPFHEVAGKYLGALPEWATPISKQEFDGKDASHLRFKATGGDDAFFRVSIEKANAWYEDPANQDALKNKAYNKDDWKKEKDKGISSWAVKYIQKQLQLGQDPRTEVRRKLWLELGLLPLFIPVFDKTMVGNLWNRLAVRLALAHLLSWESWNHRAVQDQALARAKRDELAALFLGMEDGFAGLREYELRRNESIKQHAFEPVDRPYVVSGRALRSWTRVREEWLRHGDTQESRKNICNRLQDRLRGKFGDPDVFHWLAEDGQEALWKERDCVTSFSLLNDADGLLEKRKGYALMTFADARLHPRWAMYEAPGGSNLRTYQIRKTENGLWADVVLLSPRNESAAVEEKTFNVRLAPSGQLSNVSFDQIQKGSKMVGRCRYQSANQQFEGLLGGAEILFDRKRIANEQHGATDLASKPGHVWFKLTLDVRPQAPQGWLDGKGRPALPPEAKHFKTALSNKSKFADQVRPGLRVLSVDLGVRSFAACSVFELVRGGPDQGTYFPAADGRTVDDPEKLWAKHERSFKITLPGENPSRKEEIARRAAMEELRSLNGDIRRLKAILRLSVLQEDDPRTEHLRLFMEAIVDDPAKSALNAELFKGFGDDRFRSTPDLWKQHCHFFHDKAEKVVAERFSRWRTETRPKSSSWQDWRERRGYAGGKSYWAVTYLEAVRGLILRWNMRGRTYGEVNRQDKKQFGTVASALLHHINQLKEDRIKTGADMIIQAARGFVPRKNGAGWVQVHEPCRLILFEDLARYRFRTDRSRRENSRLMRWSHREIVNEVGMQGELYGLHVDTTEAGFSSRYLASSGAPGVRCRHLVEEDFHDGLPGMHLVGELDWLLPKDKDRTANEARRLLGGMVRPGMLVPWDGGELFATLNAASQLHVIHADINAAQNLQRRFWGRCGEAIRIVCNQLSVDGSTRYEMAKAPKARLLGALQQLKNGDAPFHLTSIPNSQKPENSYVMTPTNAGKKYRAGPGEKSSGEEDELALDIVEQAEELAQGRKTFFRDPSGVFFAPDRWLPSEIYWSRIRRRIWQVTLERNSSGRQERAEMDEMPY

SEQ ID NO: 88 - protein, 1387 aa, Artificial Sequence
  Synthetic
DYKVYDVRKMIAKSEQEIGKATAKYFFYSNIMNFFKTEITLANGEIRKRPLIETNGETGEIVWDKGRDFATVRKVLSMPQVNIVKKTEVQTGGFSKESILPKRNSDKLIARKKDWDPKKYGGFDSPTVAYSVLVVAKVEKGKSKKLKSVKELLGITIMERSSFEKNPIDFLEAKGYKEVKKDLIIKLPKYSLFELENGRKRMLASAGELQKGNELALPSKYVNFLYLASHYEKLKGSPEDNEQKQLFVEQHKHYLDEIIEQISEFSKRVILADANLDKVLSAYNKHRDKPIREQAENIIHLFTLTNLGAPAAFKYFDTTIDRKRYTSTKEVLDATLIHQSITGLYETRIDLSQLGGDGGSGGSGGSGGSGGSGGSGGDKKYSIGLAIGTNSVGWAVITDEYKVPSKKFKVLGNTDRHSIKKNLIGALLFDSGETAEATRLKRTARRRYTRRKNRICYLQEIFSNEMAKVDDSFFHRLEESFLVEEDKKHERHPIFGNIVDEVAYHEKYPTIYHLRKKLVDSTDKADLRLIYLALAHMIKFRGHFLIEGDLNPDNSDVDKLFIQLVQTYNQLFEENPINASGVDAKAILSARLSKSRRLENLIAQLPGEKKNGLFGNLIALSLGLTPNFKSNFDLAEDAKLQLSKDTYDDDLDNLLAQIGDQYADLFLAAKNLSDAILLSDILRVNTEITKAPLSASMIKRYDEHHQDLTLLKALVRQQLPEKYKEIFFDQSKNGYAGYIDGGASQEEFYKFIKPILEKMDGTEELLVKLNREDLLRKQRTFDNGSIPHQIHLGELHAILRRQEDFYPFLKDNREKIEKILTFRIPYYVGPLARGNSRFAWMTRKSEETITPWNFEEVVDKGASAQSFIERMTNFDKNLPNEKVLPKHSLLYEYFTVYNELTKVKYVTEGMRKPAFLSGEQKKAIVDLLFKTNRKVTVKQLKEDYFKKIECFDSVEISGVEDRFNASLGTYHDLLKIIKDKDFLDNEENEDILEDIVLTLTLFEDREMIEERLKTYAHLFDDKVMKQLKRRRYTGWGRLSRKLINGIRDKQSGKTILDFLKSDGFANRNFMQLIHDDSLTFKEDIQKAQVSGQGDSLHEHIANLAGSPAIKKGILQTVKVVDELVKVMGRHKPENIVIEMARENQTTQKGQKNSRERMKRIEEGIKELGSQILKEHPVENTQLQNEKLYLYYLQNGRDMYVDQELDINRLSDYDVDHIVPQSFLKDDSIDNKVLTRSDKNRGKSDNVPSEEVVKKMKNYWRQLLNAKLITQRKFDNLTKAERGGLSELDKAGFIKRQLVETRQITKHVAQILDSRMNTKYDENDKLIREVKVITLKSKLVSDFRKDFQFYKVREINNYHHAHDAYLNAVVGTALIKKYPKLESEFVYG

SEQ ID NO: 89 - protein, 1388 aa, Artificial Sequence
  Synthetic
EIGKATAKYFFYSNIMNFFKTEITLANGEIRKRPLIETNGETGEIVWDKGRDFATVRKVLSMPQVNIVKKTEVQTGGFSKESILPKRNSDKLIARKKDWDPKKYGGFDSPTVAYSVLVVAKVEKGKSKKLKSVKELLGITIMERSSFEKNPIDFLEAKGYKEVKKDLIIKLPKYSLFELENGRKRMLASAGELQKGNELALPSKYVNFLYLASHYEKLKGSPEDNEQKQLFVEQHKHYLDEIIEQISEFSKRVILADANLDKVLSAYNKHRDKPIREQAENIIHLFTLTNLGAPAAFKYFDTTIDRKRYTSTKEVLDATLIHQSITGLYETRIDLSQLGGDGGSGGSGGSGGSGGSGGSGGMDKKYSIGLAIGTNSVGWAVITDEYKVPSKKFKVLGNTDRHSIKKNLIGALLFDSGETAEATRLKRTARRRYTRRKNRICYLQEIFSNEMAKVDDSFFHRLEESFLVEEDKKHERHPIFGNIVDEVAYHEKYPTIYHLRKKLVDSTDKADLRLIYLALAHMIKFRGHFLIEGDLNPDNSDVDKLFIQLVQTYNQLFEENPINASGVDAKAILSARLSKSRRLENLIAQLPGEKKNGLFGNLIALSLGLTPNFKSNFDLAEDAKLQLSKDTYDDDLDNLLAQIGDQYADLFLAAKNLSDAILLSDILRVNTEITKAPLSASMIKRYDEHHQDLTLLKALVRQQLPEKYKEIFFDQSKNGYAGYIDGGASQEEFYKFIKPILEKMDGTEELLVKLNREDLLRKQRTFDNGSIPHQIHLGELHAILRRQEDFYPFLKDNREKIEKILTFRIPYYVGPLARGNSRFAWMTRKSEETITPWNFEEVVDKGASAQSFIERMTNFDKNLPNEKVLPKHSLLYEYFTVYNELTKVKYVTEGMRKPAFLSGEQKKAIVDLLFKTNRKVTVKQLKEDYFKKIECFDSVEISGVEDRFNASLGTYHDLLKIIKDKDFLDNEENEDILEDIVLTLTLFEDREMIEERLKTYAHLFDDKVMKQLKRRRYTGWGRLSRKLINGIRDKQSGKTILDFLKSDGFANRNFMQLIHDDSLTFKEDIQKAQVSGQGDSLHEHIANLAGSPAIKKGILQTVKVVDELVKVMGRHKPENIVIEMARENQTTQKGQKNSRERMKRIEEGIKELGSQILKEHPVENTQLQNEKLYLYYLQNGRDMYVDQELDINRLSDYDVDHIVPQSFLKDDSIDNKVLTRSDKNRGKSDNVPSEEVVKKMKNYWRQLLNAKLITQRKFDNLTKAERGGLSELDKAGFIKRQLVETRQITKHVAQILDSRMNTKYDENDKLIREVKVITLKSKLVSDFRKDFQFYKVREINNYHHAHDAYLNAVVGTALIKKYPKLESEFVYGDYKVYDVRKMIAKSEQ

SEQ ID NO: 90 - protein, 1387 aa, Artificial Sequence
  Synthetic
NIMNFFKTEITLANGEIRKRPLIETNGETGEIVWDKGRDFATVRKVLSMPQVNIVKKTEVQTGGFSKESILPKRNSDKLIARKKDWDPKKYGGFDSPTVAYSVLVVAKVEKGKSKKLKSVKELLGITIMERSSFEKNPIDFLEAKGYKEVKKDLIIKLPKYSLFELENGRKRMLASAGELQKGNELALPSKYVNFLYLASHYEKLKGSPEDNEQKQLFVEQHKHYLDEIIEQISEFSKRVILADANLDKVLSAYNKHRDKPIREQAENIIHLFTLTNLGAPAAFKYFDTTIDRKRYTSTKEVLDATLIHQSITGLYETRIDLSQLGGDGGSGGSGGSGGSGGSGGSGGDKKYSIGLAIGTNSVGWAVITDEYKVPSKKFKVLGNTDRHSIKKNLIGALLFDSGETAEATRLKRTARRRYTRRKNRICYLQEIFSNEMAKVDDSFFHRLEESFLVEEDKKHERHPIFGNIVDEVAYHEKYPTIYHLRKKLVDSTDKADLRLIYLALAHMIKFRGHFLIEGDLNPDNSDVDKLFIQLVQTYNQLFEENPINASGVDAKAILSARLSKSRRLENLIAQLPGEKKNGLFGNLIALSLGLTPNFKSNFDLAEDAKLQLSKDTYDDDLDNLLAQIGDQYADLFLAAKNLSDAILLSDILRVNTEITKAPLSASMIKRYDEHHQDLTLLKALVRQQLPEKYKEIFFDQSKNGYAGYIDGGASQEEFYKFIKPILEKMDGTEELLVKLNREDLLRKQRTFDNGSIPHQIHLGELHAILRRQEDFYPFLKDNREKIEKILTFRIPYYVGPLARGNSRFAWMTRKSEETITPWNFEEVVDKGASAQSFIERMTNFDKNLPNEKVLPKHSLLYEYFTVYNELTKVKYVTEGMRKPAFLSGEQKKAIVDLLFKTNRKVTVKQLKEDYFKKIECFDSVEISGVEDRFNASLGTYHDLLKIIKDKDFLDNEENEDILEDIVLTLTLFEDREMIEERLKTYAHLFDDKVMKQLKRRRYTGWGRLSRKLINGIRDKQSGKTILDFLKSDGFANRNFMQLIHDDSLTFKEDIQKAQVSGQGDSLHEHIANLAGSPAIKKGILQTVKVVDELVKVMGRHKPENIVIEMARENQTTQKGQKNSRERMKRIEEGIKELGSQILKEHPVENTQLQNEKLYLYYLQNGRDMYVDQELDINRLSDYDVDHIVPQSFLKDDSIDNKVLTRSDKNRGKSDNVPSEEVVKKMKNYWRQLLNAKLITQRKFDNLTKAERGGLSELDKAGFIKRQLVETRQITKHVAQILDSRMNTKYDENDKLIREVKVITLKSKLVSDFRKDFQFYKVREINNYHHAHDAYLNAVVGTALIKKYPKLESEFVYGDYKVYDVRKMIAKSEQEIGKATAKYFFYS

SEQ ID NO: 91 - protein, 1388 aa, Artificial Sequence
  Synthetic
PEDNEQKQLFVEQHKHYLDEIIEQISEFSKRVILADANLDKVLSAYNKHRDKPIREQAENIIHLFTLTNLGAPAAFKYFDTTIDRKRYTSTKEVLDATLIHQSITGLYETRIDLSQLGGDGGSGGSGGSGGSGGSGGSGGMDKKYSIGLAIGTNSVGWAVITDEYKVPSKKFKVLGNTDRHSIKKNLIGALLFDSGETAEATRLKRTARRRYTRRKNRICYLQEIFSNEMAKVDDSFFHRLEESFLVEEDKKHERHPIFGNIVDEVAYHEKYPTIYHLRKKLVDSTDKADLRLIYLALAHMIKFRGHFLIEGDLNPDNSDVDKLFIQLVQTYNQLFEENPINASGVDAKAILSARLSKSRRLENLIAQLPGEKKNGLFGNLIALSLGLTPNFKSNFDLAEDAKLQLSKDTYDDDLDNLLAQIGDQYADLFLAAKNLSDAILLSDILRVNTEITKAPLSASMIKRYDEHHQDLTLLKALVRQQLPEKYKEIFFDQSKNGYAGYIDGGASQEEFYKFIKPILEKMDGTEELLVKLNREDLLRKQRTFDNGSIPHQIHLGELHAILRRQEDFYPFLKDNREKIEKILTFRIPYYVGPLARGNSRFAWMTRKSEETITPWNFEEVVDKGASAQSFIERMTNFDKNLPNEKVLPKHSLLYEYFTVYNELTKVKYVTEGMRKPAFLSGEQKKAIVDLLFKTNRKVTVKQLKEDYFKKIECFDSVEISGVEDRFNASLGTYHDLLKIIKDKDFLDNEENEDILEDIVLTLTLFEDREMIEERLKTYAHLFDDKVMKQLKRRRYTGWGRLSRKLINGIRDKQSGKTILDFLKSDGFANRNFMQLIHDDSLTFKEDIQKAQVSGQGDSLHEHIANLAGSPAIKKGILQTVKVVDELVKVMGRHKPENIVIEMARENQTTQKGQKNSRERMKRIEEGIKELGSQILKEHPVENTQLQNEKLYLYYLQNGRDMYVDQELDINRLSDYDVDHIVPQSFLKDDSIDNKVLTRSDKNRGKSDNVPSEEVVKKMKNYWRQLLNAKLITQRKFDNLTKAERGGLSELDKAGFIKRQLVETRQITKHVAQILDSRMNTKYDENDKLIREVKVITLKSKLVSDFRKDFQFYKVREINNYHHAHDAYLNAVVGTALIKKYPKLESEFVYGDYKVYDVRKMIAKSEQEIGKATAKYFFYSNIMNFFKTEITLANGEIRKRPLIETNGETGEIVWDKGRDFATVRKVLSMPQVNIVKKTEVQTGGFSKESILPKRNSDKLIARKKDWDPKKYGGFDSPTVAYSVLVVAKVEKGKSKKLKSVKELLGITIMERSSFEKNPIDFLEAKGYKEVKKDLIIKLPKYSLFELENGRKRMLASAGELQKGNELALPSKYVNFLYLASHYEKLKGS

SEQ ID NO: 92 - protein, 1387 aa, Artificial Sequence
  Synthetic
KPIREQAENIIHLFTLTNLGAPAAFKYFDTTIDRKRYTSTKEVLDATLIHQSITGLYETRIDLSQLGGDGGSGGSGGSGGSGGSGGSGGDKKYSIGLAIGTNSVGWAVITDEYKVPSKKFKVLGNTDRHSIKKNLIGALLFDSGETAEATRLKRTARRRYTRRKNRICYLQEIFSNEMAKVDDSFFHRLEESFLVEEDKKHERHPIFGNIVDEVAYHEKYPTIYHLRKKLVDSTDKADLRLIYLALAHMIKFRGHFLIEGDLNPDNSDVDKLFIQLVQTYNQLFEENPINASGVDAKAILSARLSKSRRLENLIAQLPGEKKNGLFGNLIALSLGLTPNFKSNFDLAEDAKLQLSKDTYDDDLDNLLAQIGDQYADLFLAAKNLSDAILLSDILRVNTEITKAPLSASMIKRYDEHHQDLTLLKALVRQQLPEKYKEIFFDQSKNGYAGYIDGGASQEEFYKFIKPILEKMDGTEELLVKLNREDLLRKQRTFDNGSIPHQIHLGELHAILRRQEDFYPFLKDNREKIEKILTFRIPYYVGPLARGNSRFAWMTRKSEETITPWNFEEVVDKGASAQSFIERMTNFDKNLPNEKVLPKHSLLYEYFTVYNELTKVKYVTEGMRKPAFLSGEQKKAIVDLLFKTNRKVTVKQLKEDYFKKIECFDSVEISGVEDRFNASLGTYHDLLKIIKDKDFLDNEENEDILEDIVLTLTLFEDREMIEERLKTYAHLFDDKVMKQLKRRRYTGWGRLSRKLINGIRDKQSGKTILDFLKSDGFANRNFMQLIHDDSLTFKEDIQKAQVSGQGDSLHEHIANLAGSPAIKKGILQTVKVVDELVKVMGRHKPENIVIEMARENQTTQKGQKNSRERMKRIEEGIKELGSQILKEHPVENTQLQNEKLYLYYLQNGRDMYVDQELDINRLSDYDVDHIVPQSFLKDDSIDNKVLTRSDKNRGKSDNVPSEEVVKKMKNYWRQLLNAKLITQRKFDNLTKAERGGLSELDKAGFIKRQLVETRQITKHVAQILDSRMNTKYDENDKLIREVKVITLKSKLVSDFRKDFQFYKVREINNYHHAHDAYLNAVVGTALIKKYPKLESEFVYGDYKVYDVRKMIAKSEQEIGKATAKYFFYSNIMNFFKTEITLANGEIRKRPLIETNGETGEIVWDKGRDFATVRKVLSMPQVNIVKKTEVQTGGFSKESILPKRNSDKLIARKKDWDPKKYGGFDSPTVAYSVLVVAKVEKGKSKKLKSVKELLGITIMERSSFEKNPIDFLEAKGYKEVKKDLIIKLPKYSLFELENGRKRMLASAGELQKGNELALPSKYVNFLYLASHYEKLKGSPEDNEQKQLFVEQHKHYLDEIIEQISEFSKRVILADANLDKVLSAYNKHRD

SEQ ID NO: 93 - protein, 357 aa, Artificial Sequence
  Synthetic
DYKVYDVRKMIAKSEQEIGKATAKYFFYSNIMNFFKTEITLANGEIRKRPLIETNGETGEIVWDKGRDFATVRKVLSMPQVNIVKKTEVQTGGFSKESILPKRNSDKLIARKKDWDPKKYGGFDSPTVAYSVLVVAKVEKGKSKKLKSVKELLGITIMERSSFEKNPIDFLEAKGYKEVKKDLIIKLPKYSLFELENGRKRMLASAGELQKGNELALPSKYVNFLYLASHYEKLKGSPEDNEQKQLFVEQHKHYLDEIIEQISEFSKRVILADANLDKVLSAYNKHRDKPIREQAENIIHLFTLTNLGAPAAFKYFDTTIDRKRYTSTKEVLDATLIHQSITGLYETRIDLSQLGGD

SEQ ID NO: 94 - protein, 341 aa, Artificial Sequence
  Synthetic
EIGKATAKYFFYSNIMNFFKTEITLANGEIRKRPLIETNGETGEIVWDKGRDFATVRKVLSMPQVNIVKKTEVQTGGFSKESILPKRNSDKLIARKKDWDPKKYGGFDSPTVAYSVLVVAKVEKGKSKKLKSVKELLGITIMERSSFEKNPIDFLEAKGYKEVKKDLIIKLPKYSLFELENGRKRMLASAGELQKGNELALPSKYVNFLYLASHYEKLKGSPEDNEQKQLFVEQHKHYLDEIIEQISEFSKRVILADANLDKVLSAYNKHRDKPIREQAENIIHLFTLTNLGAPAAFKYFDTTIDRKRYTSTKEVLDATLIHQSITGLYETRIDLSQLGGD

SEQ ID NO: 95 - protein, 328 aa, Artificial Sequence
  Synthetic
NIMNFFKTEITLANGEIRKRPLIETNGETGEIVWDKGRDFATVRKVLSMPQVNIVKKTEVQTGGFSKESILPKRNSDKLIARKKDWDPKKYGGFDSPTVAYSVLVVAKVEKGKSKKLKSVKELLGITIMERSSFEKNPIDFLEAKGYKEVKKDLIIKLPKYSLFELENGRKRMLASAGELQKGNELALPSKYVNFLYLASHYEKLKGSPEDNEQKQLFVEQHKHYLDEIIEQISEFSKRVILADANLDKVLSAYNKHRDKPIREQAENIIHLFTLTNLGAPAAFKYFDTTIDRKRYTSTKEVLDATLIHQSITGLYETRIDLSQLGGD

SEQ ID NO: 96 - protein, 120 aa, Artificial Sequence
  Synthetic
PEDNEQKQLFVEQHKHYLDEIIEQISEFSKRVILADANLDKVLSAYNKHRDKPIREQAENIIHLFTLTNLGAPAAFKYFDTTIDRKRYTSTKEVLDATLIHQSITGLYETRIDLSQLGGD

SEQ ID NO: 97 - protein, 69 aa, Artificial Sequence
  Synthetic
KPIREQAENIIHLFTLTNLGAPAAFKYFDTTIDRKRYTSTKEVLDATLIHQSITGLYETRIDLSQLGGD

SEQ ID NO: 98 - protein, 1367 aa, Artificial Sequence
  Synthetic
DKKYSIGLDIGTNSVGWAVITDEYKVPSKKFKVLGNTDRHSIKKNLIGALLFDSGETAEATRLKRTARRRYTRRKNRICYLQEIFSNEMAKVDDSFFHRLEESFLVEEDKKHERHPIFGNIVDEVAYHEKYPTIYHLRKKLVDSTDKADLRLIYLALAHMIKFRGHFLIEGDLNPDNSDVDKLFIQLVQTYNQLFEENPINASGVDAKAILSARLSKSRRLENLIAQLPGEKKNGLFGNLIALSLGLTPNFKSNFDLAEDAKLQLSKDTYDDDLDNLLAQIGDQYADLFLAAKNLSDAILLSDILRVNTEITKAPLSASMIKRYDEHHQDLTLLKALVRQQLPEKYKEIFFDQSKNGYAGYIDGGASQEEFYKFIKPILEKMDGTEELLVKLNREDLLRKQRTFDNGSIPHQIHLGELHAILRRQEDFYPFLKDNREKIEKILTFRIPYYVGPLARGNSRFAWMTRKSEETITPWNFEEVVDKGASAQSFIERMTNFDKNLPNEKVLPKHSLLYEYFTVYNELTKVKYVTEGMRKPAFLSGEQKKAIVDLLFKTNRKVTVKQLKEDYFKKIECFDSVEISGVEDRFNASLGTYHDLLKIIKDKDFLDNEENEDILEDIVLTLTLFEDREMIEERLKTYAHLFDDKVMKQLKRRRYTGWGRLSRKLINGIRDKQSGKTILDFLKSDGFANRNFMQLIHDDSLTFKEDIQKAQVSGQGDSLHEHIANLAGSPAIKKGILQTVKVVDELVKVMGRHKPENIVIEMARENQTTQKGQKNSRERMKRIEEGIKELGSQILKEHPVENTQLQNEKLYLYYLQNGRDMYVDQELDINRLSDYDVDAIVPQSFLKDDSIDNKVLTRSDKNRGKSDNVPSEEVVKKMKNYWRQLLNAKLITQRKFDNLTKAERGGLSELDKAGFIKRQLVETRQITKHVAQILDSRMNTKYDENDKLIREVKVITLKSKLVSDFRKDFQFYKVREINNYHHAHDAYLNAVVGTALIKKYPKLESEFVYGDYKVYDVRKMIAKSEQEIGKATAKYFFYSNIMNFFKTEITLANGEIRKRPLIETNGETGEIVWDKGRDFATVRKVLSMPQVNIVKKTEVQTGGFSKESILPKRNSDKLIARKKDWDPKKYGGFVSPTVAYSVLVVAKVEKGKSKKLKSVKELLGITIMERSSFEKNPIDFLEAKGYKEVKKDLIIKLPKYSLFELENGRKRMLASARELQKGNELALPSKYVNFLYLASHYEKLKGSPEDNEQKQLFVEQHKHYLDEIIEQISEFSKRVILADANLDKVLSAYNKHRDKPIREQAENIIHLFTLTNLGAPAAFKYFDTTIDRKQYRSTKEVLDATLIHQSITGLYETRIDLSQLGGD

SEQ ID NO: 99 - protein, 1367 aa, Artificial Sequence
  Synthetic
DKKYSIGLDIGTNSVGWAVITDEYKVPSKKFKVLGNTDRHSIKKNLIGALLFDSGETAEATRLKRTARRRYTRRKNRICYLQEIFSNEMAKVDDSFFHRLEESFLVEEDKKHERHPIFGNIVDEVAYHEKYPTIYHLRKKLVDSTDKADLRLIYLALAHMIKFRGHFLIEGDLNPDNSDVDKLFIQLVQTYNQLFEENPINASGVDAKAILSARLSKSRRLENLIAQLPGEKKNGLFGNLIALSLGLTPNFKSNFDLAEDAKLQLSKDTYDDDLDNLLAQIGDQYADLFLAAKNLSDAILLSDILRVNTEITKAPLSASMIKRYDEHHQDLTLLKALVRQQLPEKYKEIFFDQSKNGYAGYIDGGASQEEFYKFIKPILEKMDGTEELLVKLNREDLLRKQRTFDNGSIPHQIHLGELHAILRRQEDFYPFLKDNREKIEKILTFRIPYYVGPLARGNSRFAWMTRKSEETITPWNFEEVVDKGASAQSFIERMTNFDKNLPNEKVLPKHSLLYEYFTVYNELTKVKYVTEGMRKPAFLSGEQKKAIVDLLFKTNRKVTVKQLKEDYFKKIECFDSVEISGVEDRFNASLGTYHDLLKIIKDKDFLDNEENEDILEDIVLTLTLFEDREMIEERLKTYAHLFDDKVMKQLKRRRYTGWGRLSRKLINGIRDKQSGKTILDFLKSDGFANRNFMQLIHDDSLTFKEDIQKAQVSGQGDSLHEHIANLAGSPAIKKGILQTVKVVDELVKVMGRHKPENIVIEMARENQTTQKGQKNSRERMKRIEEGIKELGSQILKEHPVENTQLQNEKLYLYYLQNGRDMYVDQELDINRLSDYDVDAIVPQSFLKDDSIDNKVLTRSDKNRGKSDNVPSEEVVKKMKNYWRQLLNAKLITQRKFDNLTKAERGGLSELDKAGFIKRQLVETRQITKHVAQILDSRMNTKYDENDKLIREVKVITLKSKLVSDFRKDFQFYKVREINNYHHAHDAYLNAVVGTALIKKYPKLESEFVYGDYKVYDVRKMIAKSEQEIGKATAKYFFYSNIMNFFKTEITLANGEIRKRPLIETNGETGEIVWDKGRDFATVRKVLSMPQVNIVKKTEVQTGGFSKESILPKRNSDKLIARKKDWDPKKYGGFVSPTVAYSVLVVAKVEKGKSKKLKSVKELLGITIMERSSFEKNPIDFLEAKGYKEVKKDLIIKLPKYSLFELENGRKRMLASARELQKGNELALPSKYVNFLYLASHYEKLKGSPEDNEQKQLFVEQHKHYLDEIIEQISEFSKRVILADANLDKVLSAYNKHRDKPIREQAENIIHLFTLTNLGAPAAFKYFDTTIDRKEYRSTKEVLDATLIHQSITGLYETRIDLSQLGGD

SEQ ID NO: 100 - protein, 1300 aa, Unknown
  Francisella novicida
MSIYQEFVNKYSLSKTLRFELIPQGKTLENIKARGLILDDEKRAKDYKKAKQIIDKYHQFFIEEILSSVCISEDLLQNYSDVYFKLKKSDDDNLQKDFKSAKDTIKKQISEYIKDSEKFKNLFNQNLIDAKKGQESDLILWLKQSKDNGIELFKANSDITDIDEALEIIKSFKGWTTYFKGFHENRKNVYSSNDIPTSIIYRIVDDNLPKFLENKAKYESLKDKAPEAINYEQIKKDLAEELTFDIDYKTSEVNQRVFSLDEVFEIANFNNYLNQSGITKFNTIIGGKFVNGENTKRKGINEYINLYSQQINDKTLKKYKMSVLFKQILSDTESKSFVIDKLEDDSDVVTTMQSFYEQIAAFKTVEEKSIKETLSLLFDDLKAQKLDLSKIYFKNDKSLTDLSQQVFDDYSVIGTAVLEYITQQIAPKNLDNPSKKEQELIAKKTEKAKYLSLETIKLALEEFNKHRDIDKQCRFEEILANFAAIPMIFDEIAQNKDNLAQISIKYQNQGKKDLLQASAEDDVKAIKDLLDQTNNLLHKLKIFHISQSEDKANILDKDEHFYLVFEECYFELANIVPLYNKIRNYITQKPYSDEKFKLNFENSTLANGWDKNKEPDNTAILFIKDDKYYLGVMNKKNNKIFDDKAIKENKGEGYKKIVYKLLPGANKMLPKVFFSAKSIKFYNPSEDILRIRNHSTHTKNGSPQKGYEKFEFNIEDCRKFIDFYKQSISKHPEWKDFGFRFSDTQRYNSIDEFYREVENQGYKLTFENISESYIDSVVNQGKLYLFQIYNKDFSAYSKGRPNLHTLYWKALFDERNLQDVVYKLNGEAELFYRKQSIPKKITHPAKEAIANKNKDNPKKESVFEYDLIKDKRFTEDKFFFHCPITINFKSSGANKFNDEINLLLKEKANDVHILSIDRGERHLAYYTLVDGKGNIIKQDTFNIIGNDRMKTNYHDKLAAIEKDRDSARKDWKKINNIKEMKEGYLSQVVHEIAKLVIEYNAIVVFEDLNFGFKRGRFKVEKQVYQKLEKMLIEKLNYLVFKDNEFDKTGGVLRAYQLTAPFETFKKMGKQTGIIYYVPAGFTSKICPVTGFVNQLYPKYESVSKSQEFFSKFDKICYNLDKGYFEFSFDYKNFGDKAAKGKWTIASFGSRLINFRNSDKNHNWDTREVYPTKELEKLLKDYSIEYGHGECIKAAICGESDKKFFAKLTSVLNTILQMRNSKTGTELDYLISPVADVNGNFFDSRQAPKNMPQDADANGAYHIGLKGLMLLGRIKNNQEGKKLNLVIKNEEYFEFVQNRNN

SEQ ID NO: 101 - protein, 887 aa, Natronobacterium gregoryi
MTVIDLDSTTTADELTSGHTYDISVTLTGVYDNTDEQHPRMSLAFEQDNGERRYITLWKNTTPKDVFTYDYATGSTYIFTNIDYEVKDGYENLTATYQTTVENATAQEVGTTDEDETFAGGEPLDHHLDDALNETPDDAETESDSGHVMTSFASRDQLPEWTLHTYTLTATDGAKTDTEYARRTLAYTVRQELYTDHDAAPVATDGLMLLTPEPLGETPLDLDCGVRVEADETRTLDYTTAKDRLLARELVEEGLKRSLWDDYLVRGIDEVLSKEPVLTCDEFDLHERYDLSVEVGHSGRAYLHINFRHRFVPKLTLADIDDDNIYPGLRVKTTYRPRRGHIVWGLRDECATDSLNTLGNQSVVAYHRNNQTPINTDLLDAIEAADRRVVETRRQGHGDDAVSFPQELLAVEPNTHQIKQFASDGFHQQARSKTRLSASRCSEKAQAFAERLDPVRLNGSTVEFSSEFFTGNNEQQLRLLYENGESVLTFRDGARGAHPDETFSKGIVNPPESFEVAVVLPEQQADTCKAQWDTMADLLNQAGAPPTRSETVQYDAFSSPESISLNVAGAIDPSEVDAAFVVLPPDQEGFADLASPTETYDELKKALANMGIYSQMAYFDRFRDAKIFYTRNVALGLLAAAGGVAFTTEHAMPGDADMFIGIDVSRSYPEDGASGQINIAATATAVYKDGTILGHSSTRPQLGEKLQSTDVRDIMKNAILGYQQVTGESPTHIVIHRDGFMNEDLDPATEFLNEQGVEYDIVEIRKQPQTRLLAVSDVQYDTPVKSIAAINQNEPRATVATFGAPEYLATRDGGGLPRPIQIERVAGETDIETLTRQVYLLSQSHIQVHNSTARLPITTAYADQASTHATKGYLVQTGAFESNVGFL

SEQ ID NO: 102 - protein, 560 aa, Unknown
  Moloney Murine Leukemia Virus
  misc_feature (229)..(229): Xaa can be any naturally occurring amino acid
AFPLERPDWDYTTQAGRNHLVHYRQLLLAGLQNAGRSPTNLAKVKGITQGPNESPSAFLERLKEAYRRYTPYDPEDPGQETNVSMSFIWQSAPDIGRKLGRLEDLKSKTLGDLVREAEKIFNKRETPEEREERIRRETEEKEERRRTVDEQKEKERDRRRHREMSKLLATVVIGQEQDRQEGERKRPQLDKDQCAYCKEKGHWAKDCPKKPRGPRGPRPQTSLLTLGDXGGQGQDPPPEPRITLKVGGQPVTFLVDTGAQHSVLTQNPGPLSDKSAWVQGATGGKRYRWTTDRKVHLATGKVTHSFLHVPDCPYPLLGRDLLTKLKAQIHFEGSGAQVVGPMGQPLQVLTLNIEDEYRLHETSKEPDVSLGFTWLSDFPQAWAESGGMGLAVRQAPLIIPLKATSTPVSIKQYPMSQEARLGIKPHIQRLLDQGILVPCQSPWNTPLLPVKKPGTNDYRPVQDLREVNKRVEDIHPTVPNPYNLLSGLPPSHQWYTVLDLKDAFFCLRLHPTSQPLFAFEWRDPEMGISGQLTWTRLPQGFKNSPTLFDEALHRDLADFR

SEQ ID NO: 103 - protein, 669 aa, Feline leukemia virus
TLQLEEEYRLFEPESTQKQEMDIWLKNFPQAWAETGGMGTAHCQAPVLIQLKATATPISIRQYPMPHEAYQGIKPHIRRMLDQGILKPCQSPWNTPLLPVKKPGTEDYRPVQDLREVNKRVEDIHPTVPNPYNLLSTLPPSHPWYTVLDLKDAFFCLRLHSESQLLFAFEWRDPEIGLSGQLTWTRLPQGFKNSPTLFDEALHSDLADFRVRYPALVLLQYVDDLLLAAATRTECLEGTKALLETLGNKGYRASAKKAQICLQEVTYLGYSLKDGQRWLTKARKEAILSIPVPKNSRQVREFLGTAGYCRLWIPGFAELAAPLYPLTRPGTLFQWGTEQQLAFEDIKKALLSSPALGLPDITKPFELFIDENSGFAKGVLVQKLGPWKRPVAYLSKKLDTVASGWPPCLRMVAAIAILVKDAGKLTLGQPLTILTSHPVEALVRQPPNKWLSNARMTHYQAMLLDAERVHFGPTVSLNPATLLPLPSGGNHHDCLQILAETHGTRPDLTDQPLPDADLTWYTDGSSFIRNGEREAGAAVTTESEVIWAAPLPPGTSAQRAELIALTQALKMAEGKKLTVYTDSRYAFATTHVHGEIYRRRGLLTSEGKEIKNKNEILALLEALFLPKRLSIIHCPGHQKGDSPQAKGNRLADDTAKKAATETHSSLTVL

SEQ ID NO: 104 - protein, 559 aa, Human immunodeficiency virus type 1
  misc_feature (280)..(280): Xaa can be any naturally occurring amino acid
PISPIETVPVKLKPGMDGPKVKQWPLTEEKIKALVEICTEMEKEGKISKIGPENPYNTPVFAIKKKDSTKWRKLVDFRELNKRTQDFWEVQLGIPHPAGLKKKKSVTVLDVGDAYFSVPLDEDFRKYTAFTIPSINNETPGIRYQYNVLPQGWKGSPAIFQSSMTKILEPFRKQNPDIVIYQYMDDLYVGSDLEIGQHRTKIEELRQHLLRWGLTTPDKKHQKEPPFLWMGYELHPDKWTVQPIVLPEKDSWTVNDIQKLVGKLNWASQIYPGIKVRQLXKLLRGTKALTEVIPLTEEAELELAENREILKEPVHGVYYDPSKDLIAEIQKQGQGQWTYQIYQEPFKNLKTGKYARMRGAHTNDVKQLTEAVQKITTESIVIWGKTPKFKLPIQKETWETWWTEYWQATWIPEWEFVNTPPLVKLWYQLEKEPIVGAETFYVDGAANRETKLGKAGYVTNRGRQKVVTLTDTTNQKTELQAIYLALQDSGLEVNIVTDSQYALGIIQAQPDQSESELVNQIIEQLIKKEKVYLAWVPAHKGIGGNEQVDKLVSAGIRKV

SEQ ID NO: 105 - protein, 440 aa, Human immunodeficiency virus type 1
PISPIETVPVKLKPGMDGPKVKQWPLTEEKIKALVEICTEMEKEGKISKIGPENPYNTPVFAIKKKDSTKWRKLVDFRELNKRTQDFWEVQLGIPHPAGLKKKKSVTVLDVGDAYFSVPLDEDFRKYTAFTIPSINNETPGIRYQYNVLPQGWKGSPAIFQSSMTKILEPFRKQNPDIVIYQYMDDLYVGSDLEIGQHRTKIEELRQHLLRWGLTTPDKKHQKEPPFLWMGYELHPDKWTVQPIVLPEKDSWTVNDIQKLVGKLNWASQIYPGIKVRQLCKLLRGTKALTEVIPLTEEAELELAENREILKEPVHGVYYDPSKDLIAEIQKQGQGQWTYQIYQEPFKNLKTGKYARMRGAHTNDVKQLTEAVQKITTESIVIWGKTPKFKLPIQKETWETWWTEYWQATWIPEWEFVNTPPLVKLWYQLEKEPIVGAETF

SEQ ID NO: 106 - protein, 858 aa, Rous sarcoma virus
TVALHLAIPLKWKPNHTPVWIDQWPLPEGKLVALTQLVEKELQLGHIEPSLSCWNTPVFVIRKASGSYRLLHDLRAVNAKLVPFGAVQQGAPVLSALPRGWPLMVLDLKDCFFSIPLAEQDREAFAFTLPSVNNQAPARRFQWKVLPQGMTCSPTICQLIVGQILEPLRLKHPSLRMLHYMDDLLLAASSHDGLEAAGEEVISTLERAGFTISPDKVQKEPGVQYLGYKLGSTYAAPVGLVAEPRIATLWDVQKLVGSLQWLRPALGIPPRLRGPFYEQLRGSDPNEAREWNLDMKMAWREIVQLSTTAALERWDPALPLEGAVARCEQGAIGVLGQGLSTHPRPCLWLFSTQPTKAFTAWLEVLTLLITKLRASAVRTFGKEVDILLLPACFRDELPLPEGILLALRGFAGKIRSSDTPSIFDIARPLHVSLKVRVTDHPVPGPTVFTDASSSTHKGVVVWREGPRWEIKEIADLGASVQQLEARAVAMALLLWPTTPTNVVTDSAFVAKMLLKMGQEGVPSTAAAFILEDALSQRSAMAAVLHVRSHSEVPGFFTEGNDVADSQATFQAYPLREAKDLHTALHIGPRALSKACNISMQQAREVVQTCPHCNSAPALEAGVNPRGLGPLQIWQTDFTLEPRMAPRSWLAVTVDTASSAIVVTQHGRVTSVAAQHHWATVIAVLGRPKAIKTDNGSCFTSKSTREWLARWGIAHTTGIPGNSQGQAMVERANRLLKDKIRVLAEGDGFMKRIPTSKQGELLAKAMYALNHFERGENTKTPIQKHWRPTVLTEGPPVKIRIETGEWEKGWNVLVWGRGYAAVKNRDTDKVIWVPSRKVKPDIAQKDEVTKKDEASPLFA

SEQ ID NO: 107 - protein, 675 aa, Cauliflower mosaic virus
MMDHLLQKTQIQNQTEQVMNITNPNSIYIKGRLYFKGYKKIELHCFVDTGASLCIASKFVIPEEHWINAERPIMVKIADGSSITINKVCRDIDLIIAGEIFHIPTVYQQESGIDFIIGNNFCQLYEPFIQFTDRVIFTKDRTYPVHIAKLTRAVRVGTEGFLESMKKRSKTQQPEPVNISTNKIAILSEGRRLSEEKLFITQQRMQKIEELLEKVCSENPLDPNKTKQWMKASIKLSDPSKAIKVKPMKYSPMDREEFDKQIKELLDLKVIKPSKSPHMAPAFLVNNEAEKRRGKKRMVVNYKAMNKATVGDAYNLPNKDELLTLIRGKKIFSSFDCKSGFWQVLLDQDSRPLTAFTCPQGHYEWNVVPFGLKQAPSIFQRHMDEAFRVFRKFCCVYVDDILVFSNNEEDHLLHVAMILQKCNQHGIILSKKKAQLFKKKINFLGLEIDEGTHKPQGHILEHINKFPDTLEDKKQLQRFLGILTYASDYIPKLAQIRKPLQAKLKENVPWKWTKEDTLYMQKVKKNLQGFPPLHHPLPEEKLIIETDASDDYWGGMLKAIKINEGTNTELICRYASGSFKAAEKNYHSNDKETLAVINTIKKFSIYLTPVHFLIRTDNTHFKSFVNLNYKGDSKLGRNIRWQAWLSHYSFDVEHIKGTDNHFADFLSREFNRVNS

SEQ ID NO: 108 - protein, 366 aa, Klebsiella pneumoniae
MKEKISKIDKNFYTDIFIKTSFQNEFEAGGVIPPIAKNQVSTISNKNKTFYSLAHSSPHYSIQTRIEKFLLKNIPLSASSFAFRKERSYLHYLEPHTQNVKYCHLDIVSFFHSIDVNIVRDTFSVYFSDEFLVKEKQSLLDAFMASVTLTAELDGVEKTFIPMGFKSSPSISNIIFRKIDILIQKFCDKNKITYTRYADDLLFSTKKENNILSSTFFINEISSILSINKFKLNKSKYLYKEGTISLGGYVIENILKDNSSGNIRLSSSKLNPLYKALYEIKKGSSSKHICIKVFNLKLKRFIYKKNKEKFEAKFYSSQLKNKLLGYRSYLLSFVIFHKKYKCINPIFLEKCVFLISEIESIMNRKF

SEQ ID NO: 109 - protein, 263 aa, Escerichia coli
MKITSNNVTAVINGKGWHSINWKKCHQHVKTIQTRIAKAACNQQWRTVGRLQRLLVRSFSARALAVKRVTENSGRKTPGVDGQIWSTPESKWEAIFKLRRKGYKPLPLKRVFIPKSNGKKRPLGIPVMLDRAMQALHLLGLEPVSETNADHNSYGFRPARCTADAIQQVCNMYSSRNASKWVLEGDIKGCFEHISHEWLLENIPMDKQILRNWLKAGIIEKSIFSKTLSGTPQGGIISPVLANMALDGLERLLQNRFGRNRLI

SEQ ID NO: 110 - protein, 438 aa, Bacillus subtilis
MSKIKINYEKYHIKPFPHFDQRIKVNKKVKENLQNPFYIAAHSFYPFIHYKKISYKFKNGTLSSPKERDIFYSGHMDGYIYKHYGEILNHKYNNTCIGKGIDHVSLAYRNNKMGKSNIHFAAEVINFISEQQQAFIFVSDFSSYFDSLDHAILKEKLIEVLEEQDKLSKDWWNVFKHITRYNWVEKEEVISDLECTKEKIARDKKSRERYYTPAEFREFRKRVNIKSNDTGVGIPQGTAISAVLANVYAIDLDQKLNQYALKYGGIYRRYSDDIIMVLPMTSDGQDPSNDHVSFIKSVVKRNKVTMGDSKTSVLYYANNNIYEDYQRKRESKMDYLGFSFDGMTVKIREKSLFKYYHRTYKKINSINWASVKKEKKVGRKKLYLLYSHLGRNYKGHGNFISYCKKAHAVFEGNKKIESLINQQIKRHWKKIQKRLVDV

SEQ ID NO: 111 - protein, 426 aa, Eubacterium rectale
DTSNLMEQILSSDNLNRAYLQVVRNKGAEGVDGMKYTELKEHLAKNGETIKGQLRTRKYKPQPARRVEIPKPDGGVRNLGVPTVTDRFIQQAIAQVLTPIYEEQFHDHSYGFRPNRCAQQAILTALNIMNDGNDWIVDIDLEKFFDTVNHDKLMTLIGRTIKDGDVISIVRKYLVSGIMIDDEYEDSIVGTPQGGNLSPLLANIMLNELDKEMEKRGLNFVRYADDCIIMVGSEMSANRVMRNISRFIEEKLGLKVNMTKSKVDRPSGLKYLGFGFYFDPRAHQFKAKPHAKSVAKFKKRMKELTCRSWGVSNSYKVEKLNQLIRGWINYFKIGSMKTLCKELDSRIRYRLRMCIWKQWKTPQNQEKNLVKLGIDRNTARRVAYTGKRIAYVCNKGAVNVAISNKRLASFGLISMLDYYIEKCVTC

SEQ ID NO: 112 - protein, 412 aa, Unknown
  Geobacillus stearothermophilus
ALLERILARDNLITALKRVEANQGAPGIDGVSTDQLRDYIRAHWSTIHAQLLAGTYRPAPVRRVEIPKPGGGTRQLGIPTVVDRLIQQAILQELTPIFDPDFSSSSFGFRPGRNAHDAVRQAQGYIQEGYRYVVDMDLEKFFDRVNHDILMSRVARKVKDKRVLKLIRAYLQAGVMIEGVKVQTEEGTPQGGPLSPLLANILLDDLDKELEKRGLKFCRYADDCNIYVKSLRAGQRVKQSIQRFLEKTLKLKVNEEKSAVDRPWKRAFLGFSFTPERKARIRLAPRSIQRLKQRIRQLTNPNWSISMPERIHRVNQYVMGWIGYFRLVETPSVLQTIEGWIRRRLRLCQWLQWKRVRTRIRELRALGLKETAVMEIANTRKGAWRTTKTPQLHQALGKTYWTAQGLKSLTQR

SEQ ID NO: 113 - protein, 677 aa, Artificial Sequence
  Synthetic
TLNIEDEYRLHETSKEPDVSLGSTWLSDFPQAWAETGGMGLAVRQAPLIIPLKATSTPVSIKQYPMSQEARLGIKPHIQRLLDQGILVPCQSPWNTPLLPVKKPGTNDYRPVQDLREVNKRVEDIHPTVPNPYNLLSGLPPSHQWYTVLDLKDAFFCLRLHPTSQPLFAFEWRDPEMGISGQLTWTRLPQGFKNSPTLFNEALHRDLADFRIQHPDLILLQYVDDLLLAATSELDCQQGTRALLQTLGNLGYRASAKKAQICQKQVKYLGYLLKEGQRWLTEARKETVMGQPTPKTPRQLREFLGTAGFCRLWIPGFAEMAAPLYPLTKTGTLFNWGPDQQKAYQEIKQALLTAPALGLPDLTKPFELFVDEKQGYAKGVLTQKLGPWRRPVAYLSKKLDPVAAGWPPCLRMVAAIAVLTKDAGKLTMGQPLVILAPHAVEALVKQPPDRWLSNARMTHYQALLLDTDRVQFGPVVALNPATLLPLPEEGLQHNCLDILAEAHGTRPDLTDQPLPDADHTWYTDGSSLLQEGQRKAGAAVTTETEVIWAKALPAGTSAQRAELIALTQALKMAEGKKLNVYTDSRYAFATAHIHGEIYRRRGLLTSEGKEIKNKDEILALLKALFLPKRLSIIHCPGHQKGHSAEARGNRMADQAARKAAITETPDTSTLLIENSSP

SEQ ID NO: 114 - protein, 677 aa, Artificial Sequence
  Synthetic
TLNIEDEYRLHETSKEPDVSLGSTWLSDFPQAWAETGGMGLAVRQAPLIIPLKATSTPVSIKQYPMSQEARLGIKPHIQRLLDQGILVPCQSPWNTPLLPVKKPGTNDYRPVQDLREVNKRVEDIHPTVPNPYNLLSGLPPSHQWYTVLDLKDAFFCLRLHPTSQPLFAFEWRDPEMGISGQLTWTRLPQGFKNSPTLFNEALHRDLADFRIQHPDLILLQYVDDLLLAATSELDCQQGTRALLQTLGNLGYRASAKKAQICQKQVKYLGYLLKEGQRWLTEARKETVMGQPTPKTPRQLREFLGTAGFCRLWIPGFAEMAAPLYPLTKPGTLFNWGPDQQKAYQEIKQALLTAPALGLPDLTKPFELFVDEKQGYAKGVLTQKLGPWRRPVAYLSKKLDPVAAGWPPCLRMVAAIAVLTKDAGKLTMGQPLVILAPHAVEALVKQPPDRWLSNARMTHYQALLLDTDRVQFGPVVALNPATLLPLPEEGLQHNCLDILAEAHGTRPDLTDQPLPDADHTWYTDGSSLLQEGQRKAGAAVTTETEVIWAKALPAGTSAQRAELIALTQALKMAEGKKLNVYTDSRYAFATAHIHGEIYRRRGLLTSEGKEIKNKDEILALLKALFLPKRLSIIHCPGHQKGHSAEARGNRMADQAARKAAITETPDTSTLLIENSSP

SEQ ID NO: 115 - protein, 677 aa, Artificial Sequence
  Synthetic
TLNIEDEYRLHETSKEPDVSLGSTWLSDFPQAWAETGGMGLAVRQAPLIIPLKATSTPVSIKQYPMSQEARLGIKPHIQRLLDQGILVPCQSPWNTPLLPVKKPGTNDYRPVQDLREVNKRVEDIHPTVPNPYNLLSGLPPSHQWYTVLDLKDAFFCLRLHPTSQPLFAFEWRDPEMGISGQLTWTRLPQGFKNSPTLFNEALHRDLADFRIQHPDLILLQYVDDLLLAATSELDCQQGTRALLQTLGNLGYRASAKKAQICQKQVKYLGYLLKEGQRWLTEARKETVMGQPTPKTPRQLREFLGTAGFCRLWIPGFAEMAAPLYPLTKPGTLFNWGPDQQKAYQEIKQALLTAPALGLPDLTKPFELFVDEKQGYAKGVLTQKLGPWRRPVAYLSKKLDPVAAGWPPCLRMVAAIAVLTKDAGKLTMGQPLVILAPHAVEALVKQPPDRWLSNARMTHYQALLLDTDRVQFGPVVALNPATLLPLPEEGLQHNCLDILAEAHGTRPDLTDQPLPDADHTWYTDGSSLLQEGQRKAGAAVTTETEVIWAKALPAGTSAQRAELIALTQALKMAEGKKLNVYTDSRYAFATAHIHGEIYRRRGWLTSEGKEIKNKDEILALLKALFLPKRLSIIHCPGHQKGHSAEARGNRMADQAARKAAITETPDTSTLLIENSSP

SEQ ID NO: 116 - protein, 677 aa, Artificial Sequence
  Synthetic
TLNIEDEYRLHETSKEPDVSLGSTWLSDFPQAWAETGGMGLAVRQAPLIIPLKATSTPVSIKQYPMSQKARLGIKPHIQRLLDQGILVPCQSPWNTPLLPVKKPGTNDYRPVQDLREVNKRVEDIHPTVPNPYNLLSGLPPSHQWYTVLDLKDAFFCLRLHPTSQPLFAFEWRDPEMGISGQLTWTRLPQGFKNSPTLFNEALHRDLADFRIQHPDLILLQYVDDLLLAATSELDCQQGTRALLQTLGNLGYRASAKKAQICQKQVKYLGYLLKEGQRWLTEARKETVMGQPTPKTPRQLREFLGTAGFCRLWIPGFAEMAAPLYPLTKPGTLFNWGPDQQKAYQEIKQALLTAPALGLPDLTKPFELFVDEKQGYAKGVLTQKLGPWRRPVAYLSKKLDPVAAGWPPCLRMVAAIAVLTKDAGKLTMGQPLVILAPHAVEALVKQPPDRWLSNARMTHYQALLLDTDRVQFGPVVALNPATLLPLPEEGLQHNCLDILAEAHGTRPDLTDQPLPDADHTWYTDGSSLLQEGQRKAGAAVTTETEVIWAKALPAGTSAQRAELIALTQALKMAEGKKLNVYTDSRYAFATAHIHGEIYRRRGWLTSEGKEIKNKDEILALLKALFLPKRLSIIHCPGHQKGHSAEARGNRMADQAARKAAITETPDTSTLLIENSSP

SEQ ID NO: 117 - protein, 677 aa, Artificial Sequence
  Synthetic
TLNIEDEYRLHETSKEPDVSLGSTWLSDFPQAWAETGGMGLAVRQAPLIIPLKATSTPVSIKQYPMSQEARLGIKPHIQRLLDQGILVPCQSPWNTPLLPVKKPGTNDYRPVQDLREVNKRVEDIHPTVPNPYNLLSGLPPSHQWYTVLDLKDAFFCLRLHPTSQPLFAFEWRDPEMGISGQLTWTRLPQGFKNSPTLFNEALHRDLADFRIQHPDLILLQYVDDLLLAATSELDCQQGTRALLQTLGNLGYRASAKKAQICQKQVKYLGYLLKEGQRWLTEARKETVMGQPTPKTPRQLRRFLGTAGFCRLWIPGFAEMAAPLYPLTKPGTLFNWGPDQQKAYQEIKQALLTAPALGLPDLTKPFELFVDEKQGYAKGVLTQKLGPWRRPVAYLSKKLDPVAAGWPPCLRMVAAIAVLTKDAGKLTMGQPLVILAPHAVEALVKQPPDRWLSNARMTHYQALLLDTDRVQFGPVVALNPATLLPLPEEGLQHNCLDILAEAHGTRPDLTDQPLPDADHTWYTDGSSLLQEGQRKAGAAVTTETEVIWAKALPAGTSAQRAELIALTQALKMAEGKKLNVYTDSRYAFATAHIHGEIYRRRGWLTSEGKEIKNKDEILALLKALFLPKRLSIIHCPGHQKGHSAEARGNRMADQAARKAAITETPDTSTLLIENSSP

SEQ ID NO: 118 - protein, 677 aa, Artificial Sequence
  Synthetic
TLNIEDEYRLHETSKEPDVSLGSTWLSDFPQAWAETGGMGLAVRQAPLIIPLKATSTPVSIKQYPMSQEARLGIKPHIQRLLDQGILVPCQSPWNTPLLPVKKPGTNDYRPVQDLREVNKRVEDIHPTVPNPYNLLSGLPPSHQWYTVLDLKDAFFCLRLHPTSQPLFAFEWRDPEMGISGQLTWTRLPQGFKNSPTLFNEALHRDLADFRIQHPDLILLQYVDDLLLAATSELDCQQGTRALLQTLGNLGYRASAKKAQICQKQVKYLGYLLKEGQRWLTEARKETVMGQPTPKTPRQLREFLGTAGFCRLWIPGFAEMAAPLYPLTKPGTLFNWGPDQQKAYQEIKQALLTAPALGLPDLTKPFELFVDEKQGYAKGVLTQKLGPWRRPVAYLSKKLDPVAAGWPPCLRMVAAIAVLTKDAGKLTMGQPLVILAPHAVEALVKQPPDRWLSNARMTHYQALLLDTDRVQFGPVVALNPATLLPLPEEGLQHNCLDILAEAHGTRPDLTDQPLPDADHTWYTDGSSLLQEGQRKAGAAVTTETEVIWAKALPAGTSAQRAELIALTQALKMAEGKKLNVYTDSRYAFATAHIHGEIYRRRGWLTSKGKEIKNKDEILALLKALFLPKRLSIIHCPGHQKGHSAEARGNRMADQAARKAAITETPDTSTLLIENSSP

SEQ ID NO: 119 - protein, 677 aa, Artificial Sequence
  Synthetic
TLNIEDEYRLHETSKEPDVSLGSTWLSDFPQAWAETGGMGLAVRQAPLIIPLKATSTPVSIKQYPMSQEARLGIKPHIQRLLDQGILVPCQSPWNTPLLPVKKPGTNDYRPVQDLREVNKRVEDIHPTVPNPYNLLSGPPPSHQWYTVLDLKDAFFCLRLHPTSQPLFAFEWRDPEMGISGQLTWTRLPQGFKNSPTLFNEALHRDLADFRIQHPDLILLQYVDDLLLAATSELDCQQGTRALLQTLGNLGYRASAKKAQICQKQVKYLGYLLKEGQRWLTEARKETVMGQPTPKTPRQLREFLGTAGFCRLWIPGFAEMAAPLYPLTKPGTLFNWGPDQQKAYQEIKQALLTAPALGLPDLTKPFELFVDEKQGYAKGVLTQKLGPWRRPVAYLSKKLDPVAAGWPPCLRMVAAIAVLTKDAGKLTMGQPLVILAPHAVEALVKQPPDRWLSNARMTHYQALLLDTDRVQFGPVVALNPATLLPLPEEGLQHNCLDILAEAHGTRPDLTDQPLPDADHTWYTDGSSLLQEGQRKAGAAVTTETEVIWAKALPAGTSAQRAELIALTQALKMAEGKKLNVYTDSRYAFATAHIHGEIYRRRGWLTSEGKEIKNKDEILALLKALFLPKRLSIIHCPGHQKGHSAEARGNRMADQAARKAAITETPDTSTLLIENSSP

SEQ ID NO: 120 - protein, 677 aa, Artificial Sequence
  Synthetic
TLNIEDEYRLHETSKEPDVSLGSTWLSDFPQAWAETGGMGLAVRQAPLIIPLKATSTPVSIKQYPMSQEARLGIKPHIQRLLDQGILVPCQSPWNTPLLPVKKPGTNDYRPVQDLREVNKRVEDIHPTVPNPYNLLSGLPPSHQWYTVLDLKDAFFCLRLHPTSQPLFAFEWRDPEMGISGQLTWTRLPQGFKNSPTLFNEALHRDLADFRIQHPDLILLQYVDDLLLAATSELDCQQGTRALLQTLGNLGYRASAKKAQICQKQVKYLGYLLKEGQRWLTEARKETVMGQPTPKTPRQLREFLGTAGFCRLWIPGFAEMAAPLYPLTKPGTLFNWGPDQQKAYQEIKQALLTAPALGLPDLTKPFELFVDEKQGYAKGVLTQKLGPWRRPVAYLSKKLDPVAAGWPPCLRMVAAIAVLTKDAGKLTMGQPLVIGAPHAVEALVKQPPDRWLSNARMTHYQALLLDTDRVQFGPVVALNPATLLPLPEEGLQHNCLDILAEAHGTRPDLTDQPLPDADHTWYTDGSSLLQEGQRKAGAAVTTETEVIWAKALPAGTSAQRAELIALTQALKMAEGKKLNVYTDSRYAFATAHIHGEIYRRRGWLTSEGKEIKNKDEILALLKALFLPKRLSIIHCPGHQKGHSAEARGNRMADQAARKAAITETPDTSTLLIENSSP

SEQ ID NO: 121 - protein, 677 aa, Artificial Sequence
  Synthetic
TLNIEDEYRLHETSKEPDVSLGSTWLSDFPQAWAETGGMGLAVRQAPLIIPLKATSTPVSIKQYPMSQEARLGIKPHIQRLLDQGILVPCQSPWNTPLLPVKKPGTNDYRPVQDLREVNKRVEDIHPTVPNPYNLLSGLPPSHQWYTVLDLKDAFFCLRLHPTSQPLFAFEWRDPEMGISGQLTWTRLPQGFKNSPTLFNEALHRDLADFRIQHPDLILLQYVDDLLLAATSELDCQQGTRALLQTLGNLGYRASAKKAQICQKQVKYLGYLLKEGQRWLTEARKETVMGQPTPKTPRQLREFLGTAGFCRLWIPGFAEMAAPLYPLTKPGTLFNWGPDQQKAYQEIKQALLTAPALGLPDLTKPFELFVDEKQGYAKGVLTQKLGPWRRPVAYLSKKLDPVAAGWPPCLRMVAAIAVLTKDAGKLTMGQPLVILAPHAVEALVKQPPDRWLSKARMTHYQALLLDTDRVQFGPVVALNPATLLPLPEEGLQHNCLDILAEAHGTRPDLTDQPLPDADHTWYTDGSSLLQEGQRKAGAAVTTETEVIWAKALPAGTSAQRAELIALTQALKMAEGKKLNVYTDSRYAFATAHIHGEIYRRRGWLTSEGKEIKNKDEILALLKALFLPKRLSIIHCPGHQKGHSAEARGNRMADQAARKAAITETPDTSTLLIENSSP

SEQ ID NO: 122 - protein, 677 aa, Artificial Sequence
  Synthetic
TLNIEDEYRLHETSKEPDVSLGSTWLSDFPQAWAETGGMGLAVRQAPLIIPLKATSTPVSIKQYPMSQEARLGIKPHIQRLLDQGILVPCQSPWNTPLLPVKKPGTNDYRPVQDLREVNKRVEDIHPTVPNPYNLLSGLPPSHQWYTVLDLKDAFFCLRLHPTSQPLFAFEWRDPEMGISGQLTWTRLPQGFKNSPTLFNEALHRDLADFRIQHPDLILLQYVDDLLLAATSELDCQQGTRALLQTLGNLGYRASAKKAQICQKQVKYLGYLLKEGQRWLTEARKETVMGQPTPKTPRQLREFLGKAGFCRLWIPGFAEMAAPLYPLTKPGTLFNWGPDQQKAYQEIKQALLTAPALGLPDLTKPFELFVDEKQGYAKGVLTQKLGPWRRPVAYLSKKLDPVAAGWPPCLRMVAAIAVLTKDAGKLTMGQPLVILAPHAVEALVKQPPDRWLSNARMTHYQALLLDTDRVQFGPVVALNPATLLPLPEEGLQHNCLDILAEAHGTRPDLTDQPLPDADHTWYTDGSSLLQEGQRKAGAAVTTETEVIWAKALPAGTSAQRAELIALTQALKMAEGKKLNVYTDSRYAFATAHIHGEIYRRRGWLTSEGKEIKNKDEILALLKALFLPKRLSIIHCPGHQKGHSAEARGNRMADQAARKAAITETPDTSTLLIENSSP

SEQ ID NO: 123 - protein, 677 aa, Artificial Sequence
  Synthetic
TLNIEDEYRLHETSKEPDVSLGSTWLSDFPQAWAETGGMGLAVRQAPLIIPLKATSTPVSIKQYPMSQEARLGIKPHIQRLLDQGILVPCQSPWNTPLLPVKKPGTNDYRPVQDLREVNKRVEDIHPTVPNPYNLLSGLPPSHQWYTVLDLKDAFFCLRLHPTSQPLFAFEWRDPEMGISGQLTWTRLPQGFKNSPTLFNEALHRDLADFRIQHPDLILLQYVDDLLLAATSELDCQQGTRALLQTLGNLGYRASAKKAQICQKQVKYLGYLLKEGQRWLTEARKETVMGQPTPKTPRQLREFLGTAGFCRLFIPGFAEMAAPLYPLTKPGTLFNWGPDQQKAYQEIKQALLTAPALGLPDLTKPFELFVDEKQGYAKGVLTQKLGPWRRPVAYLSKKLDPVAAGWPPCLRMVAAIAVLTKDAGKLTMGQPLVILAPHAVEALVKQPPDRWLSNARMTHYQALLLDTDRVQFGPVVALNPATLLPLPEEGLQHNCLDILAEAHGTRPDLTDQPLPDADHTWYTDGSSLLQEGQRKAGAAVTTETEVIWAKALPAGTSAQRAELIALTQALKMAEGKKLNVYTDSRYAFATAHIHGEIYRRRGWLTSEGKEIKNKDEILALLKALFLPKRLSIIHCPGHQKGHSAEARGNRMADQAARKAAITETPDTSTLLIENSSP

SEQ ID NO: 124 - protein, 677 aa, Artificial Sequence
  Synthetic
TLNIEDEYRLHETSKEPDVSLGSTWLSDFPQAWAETGGMGLAVRQAPLIIPLKATSTPVSIKQYPMSQEARLGIKPHIQRLLDQGILVPCQSPWNTPLLPVKKPGTNDYRPVQDLREVNKRVEDIHPTVPNPYNLLSGLPPSHQWYTVLDLKDAFFCLRLHPTSQPLFAFEWRDPEMGISGQLTWTRLPQGFKNSPTLFNEALHRDLADFRIQHPDLILLQYVDDLLLAATSELDCQQGTRALLQTLGNLGYRASAKKAQICQKQVKYLGYLLKEGQRWLTEARKETVMGQPTPKTPRQLREFLGTAGFCRLWIPGFAEMAAPLYPLTKPGTLFNWGPDQQKAYQEIKQALLTAPALGLPDLTKPFELFVDEKQGYAKGVLTQKLGPWRRPVAYLSKKLDPVAAGWPPCLRMVAAIAVLTKDAGKLTMGQPLVILAPHAVEALVKQPPDRWLSNARMTHYQALLLDTDRVQFGPVVALNPATLLPLPEEGLQHNCLDILAEAHGTRPDLTDQPLPDADHTWYTGGSSLLQEGQRKAGAAVTTETEVIWAKALPAGTSAQRAQLIALTQALKMAEGKKLNVYTNSRYAFATAHIHGEIYRRRGWLTSEGKEIKNKDEILALLKALFLPKRLSIIHCPGHQKGHSAEARGNRMADQAARKAAITETPDTSTLLIENSSP

SEQ ID NO: 125 - protein, 677 aa, Artificial Sequence
  Synthetic
TLNIEDEYRLHETSKEPDVSLGSTWLSDFPQAWAETGGMGLAVRQAPLIIPLKATSTPVSIKQYPMSQEARLGIKPHIQRLLDQGILVPCQSPWNTPLLPVKKPGTNDYRPVQDLREVNKRVEDIHPTVPNPYNLLSGLPPSHQWYTVLDLKDAFFCLRLHPTSQPLFAFEWRDPEMGISGQLTWTRLPQGFKNSPTLFNEALHRDLADFRIQHPDLILLQYVDDLLLAATSELDCQQGTRALLQTLGNLGYRASAKKAQICQKQVKYLGYLLKEGQRWLTEARKETVMGQPTPKTPRQLRRFLGTAGFCRLFIPGFAEMAAPLYPLTKPGTLFNWGPDQQKAYQEIKQALLTAPALGLPDLTKPFELFVDEKQGYAKGVLTQKLGPWRRPVAYLSKKLDPVAAGWPPCLRMVAAIAVLTKDAGKLTMGQPLVILAPHAVEALVKQPPDRWLSNARMTHYQALLLDTDRVQFGPVVALNPATLLPLPEEGLQHNCLDILAEAHGTRPDLTDQPLPDADHTWYTDGSSLLQEGQRKAGAAVTTETEVIWAKALPAGTSAQRAELIALTQALKMAEGKKLNVYTDSRYAFATAHIHGEIYRRRGWLTSEGKEIKNKDEILALLKALFLPKRLSIIHCPGHQKGHSAEARGNRMADQAARKAAITETPDTSTLLIENSSP

SEQ ID NO: 126 - protein, 677 aa, Artificial Sequence
  Synthetic
TLNIEDEYRLHETSKEPDVSLGSTWLSDFPQAWAETGGMGLAVRQAPLIIPLKATSTPVSIKQYPMSQEARLGIKPHIQRLLDQGILVPCQSPWNTPLLPVKKPGTNDYRPVQDLREVNKRVEDIHPTVPNPYNLLSGPPPSHQWYTVLDLKDAFFCLRLHPTSQPLFAFEWRDPEMGISGQLTWTRLPQGFKNSPTLFNEALHRDLADFRIQHPDLILLQYVDDLLLAATSELDCQQGTRALLQTLGNLGYRASAKKAQICQKQVKYLGYLLKEGQRWLTEARKETVMGQPTPKTPRQLREFLGTAGFCRLWIPGFAEMAAPLYPLTKPGTLFNWGPDQQKAYQEIKQALLTAPALGLPDLTKPFELFVDEKQGYAKGVLTQKLGPWRRPVAYLSKKLDPVAAGWPPCLRMVAAIAVLTKDAGKLTMGQPLVILAPHAVEALVKQPPDRWLSNARMTHYQALLLDTDRVQFGPVVALNPATLLPLPEEGLQHNCLDILAEAHGTRPDLTDQPLPDADHTWYTDGSSLLQEGQRKAGAAVTTETEVIWAKALPAGTSAQRAELIALTQALKMAEGKKLNVYTDSRYAFATAHIHGEIYRRRGWLTSKGKEIKNKDEILALLKALFLPKRLSIIHCPGHQKGHSAEARGNRMADQAARKAAITETPDTSTLLIENSSP

SEQ ID NO: 127 - protein, 677 aa, Artificial Sequence
  Synthetic
TLNIEDEYRLHETSKEPDVSLGSTWLSDFPQAWAETGGMGLAVRQAPLIILLKATSTPVSIKQYPMKQEARLGIKPHIQRLLDQGILVPCQSPWNTPLLPVKKPGTNDYRPVQDLREVNKRVEDIHPTVPNPYNLLSGLPPSHQWYTVLDLKDAFFCLRLHPTSQPLFAFEWRDPEMGISGQLTWTRLPQGFKNSPALFDEALRRDLADFRIQHPDLILLQYVDDLLLAATSELDCQQGTRALLQTLGNLGYRASAKKAQICQKQVKYLGYLLKEGQRWLTEARKETVMGQPTPKTPRQLRKFLGTAGNCRLFIPGFAEMAAPLYPLTKPGTLFNWGPDQQKAYQEIKQALLTAPALGLPDLTKPFELFVDEKQGYAKGVLTQKLGPWRRPVAYLSKKLDPVAAGWPPCLRMVAAIAVLTKDAGKLTMGQPLVIGAPHAVEALVKQPPDRWLSKARMTHYQALLLDTDRVQFGPVVALNPATLLPLPEEGLQHNCLDILAEAHGTRPDLTDQPLPDADHTWYTGGSSLLQEGQRKAGAAVTTETEVIWAKALPAGTSAQRAELIALTQALKMAEGKKLNVYTNSRYAFATAHIQGEIYRRRGLLTSEGKEIKNKDEILALLKALFLPKRLSIIHCPGHQKGHSAEARGNRMANQAARKAAITETPDTSTLLIENSSP

SEQ ID NO: 128 - protein, 677 aa, Artificial Sequence
  Synthetic
TLNIEDEYRLHETSKEPDVSLGSTWLSDFPQAWAETGGMGLAVRQAPLIILLKATSTPVSIKQYPMKQEARLGIKPHIQRLLDQGILVPCQSPWNTPLLPVKKPGTNDYRPVQDLREVNKRVEDIHPTVPNPYNLLSGLPPSHQWYTVLDLKDAFFCLRLHPTSQPLFAFEWRDPEMGISGQLTWTRLPQGFKNSPALFNEALRRDLADFRIQHPDLILLQYVDDLLLAATSELDCQQGTRALLQTLGNLGYRASAKKAQICQKQVKYLGYLLKEGQRWLTEARKETVMGQPTPKTPRQLRKFLGTAGNCRLFIPGFAEMAAPLYPLTKPGTLFNWGPDQQKAYQEIKQALLTAPALGLPDLTKPFELFVDEKQGYAKGVLTQKLGPWRRPVAYLSKKLDPVAAGWPPCLRMVAAIAVLTKDAGKLTMGQPLVIGAPHAVEALVKQPPDRWLSKARMTHYQALLLDTDRVQFGPVVALNPATLLPLPEEGLQHNCLDILAEAHGTRPDLTDQPLPDADHTWYTGGSSLLQEGQRKAGAAVTTETEVIWAKALPAGTSAQRAELIALTQALKMAEGKKLNVYTNSRYAFATAHIQGEIYRRRGLLTSEGKEIKNKDEILALLKALFLPKRLSIIHCPGHQKGHSAEARGNRMANQAARKAAITETPDTSTLLIENSSP

SEQ ID NO: 129 - protein, 2117 aa, Artificial Sequence
  Synthetic
MKRTADGSEFESPKKKRKVTLNIEDEYRLHETSKEPDVSLGSTWLSDFPQAWAETGGMGLAVRQAPLIIPLKATSTPVSIKQYPMSQEARLGIKPHIQRLLDQGILVPCQSPWNTPLLPVKKPGTNDYRPVQDLREVNKRVEDIHPTVPNPYNLLSGLPPSHQWYTVLDLKDAFFCLRLHPTSQPLFAFEWRDPEMGISGQLTWTRLPQGFKNSPTLFDEALHRDLADFRIQHPDLILLQYVDDLLLAATSELDCQQGTRALLQTLGNLGYRASAKKAQICQKQVKYLGYLLKEGQRWLTEARKETVMGQPTPKTPRQLREFLGTAGFCRLWIPGFAEMAAPLYPLTKTGTLFNWGPDQQKAYQEIKQALLTAPALGLPDLTKPFELFVDEKQGYAKGVLTQKLGPWRRPVAYLSKKLDPVAAGWPPCLRMVAAIAVLTKDAGKLTMGQPLVILAPHAVEALVKQPPDRWLSNARMTHYQALLLDTDRVQFGPVVALNPATLLPLPEEGLQHNCLDILAEAHGTRPDLTDQPLPDADHTWYTDGSSLLQEGQRKAGAAVTTETEVIWAKALPAGTSAQRAELIALTQALKMAEGKKLNVYTDSRYAFATAHIHGEIYRRRGLLTSEGKEIKNKDEILALLKALFLPKRLSIIHCPGHQKGHSAEARGNRMADQAARKAAITETPDTSTLLIENSSPSGGSSGGSSGSETPGTSESATPESSGGSSGGSSDKKYSIGLDIGTNSVGWAVITDEYKVPSKKFKVLGNTDRHSIKKNLIGALLFDSGETAEATRLKRTARRRYTRRKNRICYLQEIFSNEMAKVDDSFFHRLEESFLVEEDKKHERHPIFGNIVDEVAYHEKYPTIYHLRKKLVDSTDKADLRLIYLALAHMIKFRGHFLIEGDLNPDNSDVDKLFIQLVQTYNQLFEENPINASGVDAKAILSARLSKSRRLENLIAQLPGEKKNGLFGNLIALSLGLTPNFKSNFDLAEDAKLQLSKDTYDDDLDNLLAQIGDQYADLFLAAKNLSDAILLSDILRVNTEITKAPLSASMIKRYDEHHQDLTLLKALVRQQLPEKYKEIFFDQSKNGYAGYIDGGASQEEFYKFIKPILEKMDGTEELLVKLNREDLLRKQRTFDNGSIPHQIHLGELHAILRRQEDFYPFLKDNREKIEKILTFRIPYYVGPLARGNSRFAWMTRKSEETITPWNFEEVVDKGASAQSFIERMTNFDKNLPNEKVLPKHSLLYEYFTVYNELTKVKYVTEGMRKPAFLSGEQKKAIVDLLFKTNRKVTVKQLKEDYFKKIECFDSVEISGVEDRFNASLGTYHDLLKIIKDKDFLDNEENEDILEDIVLTLTLFEDREMIEERLKTYAHLFDDKVMKQLKRRRYTGWGRLSRKLINGIRDKQSGKTILDFLKSDGFANRNFMQLIHDDSLTFKEDIQKAQVSGQGDSLHEHIANLAGSPAIKKGILQTVKVVDELVKVMGRHKPENIVIEMARENQTTQKGQKNSRERMKRIEEGIKELGSQILKEHPVENTQLQNEKLYLYYLQNGRDMYVDQELDINRLSDYDVDAIVPQSFLKDDSIDNKVLTRSDKNRGKSDNVPSEEVVKKMKNYWRQLLNAKLITQRKFDNLTKAERGGLSELDKAGFIKRQLVETRQITKHVAQILDSRMNTKYDENDKLIREVKVITLKSKLVSDFRKDFQFYKVREINNYHHAHDAYLNAVVGTALIKKYPKLESEFVYGDYKVYDVRKMIAKSEQEIGKATAKYFFYSNIMNFFKTEITLANGEIRKRPLIETNGETGEIVWDKGRDFATVRKVLSMPQVNIVKKTEVQTGGFSKESILPKRNSDKLIARKKDWDPKKYGGFDSPTVAYSVLVVAKVEKGKSKKLKSVKELLGITIMERSSFEKNPIDFLEAKGYKEVKKDLIIKLPKYSLFELENGRKRMLASAGELQKGNELALPSKYVNFLYLASHYEKLKGSPEDNEQKQLFVEQHKHYLDEIIEQISEFSKRVILADANLDKVLSAYNKHRDKPIREQAENIIHLFTLTNLGAPAAFKYFDTTIDRKRYTSTKEVLDATLIHQSITGLYETRIDLSQLGGDSGGSKRTADGSEFEPKKKRKV

SEQ ID NO: 130 - protein, 2144 aa, Artificial Sequence
  Synthetic
MKRTADGSEFESPKKKRKVTLNIEDEYRLHETSKEPDVSLGSTWLSDFPQAWAETGGMGLAVRQAPLIIPLKATSTPVSIKQYPMSQEARLGIKPHIQRLLDQGILVPCQSPWNTPLLPVKKPGTNDYRPVQDLREVNKRVEDIHPTVPNPYNLLSGLPPSHQWYTVLDLKDAFFCLRLHPTSQPLFAFEWRDPEMGISGQLTWTRLPQGFKNSPTLFDEALHRDLADFRIQHPDLILLQYVDDLLLAATSELDCQQGTRALLQTLGNLGYRASAKKAQICQKQVKYLGYLLKEGQRWLTEARKETVMGQPTPKTPRQLREFLGTAGFCRLWIPGFAEMAAPLYPLTKTGTLFNWGPDQQKAYQEIKQALLTAPALGLPDLTKPFELFVDEKQGYAKGVLTQKLGPWRRPVAYLSKKLDPVAAGWPPCLRMVAAIAVLTKDAGKLTMGQPLVILAPHAVEALVKQPPDRWLSNARMTHYQALLLDTDRVQFGPVVALNPATLLPLPEEGLQHNCLDILAEAHGTRPDLTDQPLPDADHTWYTDGSSLLQEGQRKAGAAVTTETEVIWAKALPAGTSAQRAELIALTQALKMAEGKKLNVYTDSRYAFATAHIHGEIYRRRGLLTSEGKEIKNKDEILALLKALFLPKRLSIIHCPGHQKGHSAEARGNRMADQAARKAAITETPDTSTLLIENSSPSGGSSGGSSGSETPGTSESATPESAGSYPYDVPDYAGSAAPAAKKKKLDGSGSGGSSGGSDKKYSIGLDIGTNSVGWAVITDEYKVPSKKFKVLGNTDRHSIKKNLIGALLFDSGETAEATRLKRTARRRYTRRKNRICYLQEIFSNEMAKVDDSFFHRLEESFLVEEDKKHERHPIFGNIVDEVAYHEKYPTIYHLRKKLVDSTDKADLRLIYLALAHMIKFRGHFLIEGDLNPDNSDVDKLFIQLVQTYNQLFEENPINASGVDAKAILSARLSKSRRLENLIAQLPGEKKNGLFGNLIALSLGLTPNFKSNFDLAEDAKLQLSKDTYDDDLDNLLAQIGDQYADLFLAAKNLSDAILLSDILRVNTEITKAPLSASMIKRYDEHHQDLTLLKALVRQQLPEKYKEIFFDQSKNGYAGYIDGGASQEEFYKFIKPILEKMDGTEELLVKLNREDLLRKQRTFDNGSIPHQIHLGELHAILRRQEDFYPFLKDNREKIEKILTFRIPYYVGPLARGNSRFAWMTRKSEETITPWNFEEVVDKGASAQSFIERMTNFDKNLPNEKVLPKHSLLYEYFTVYNELTKVKYVTEGMRKPAFLSGEQKKAIVDLLFKTNRKVTVKQLKEDYFKKIECFDSVEISGVEDRFNASLGTYHDLLKIIKDKDFLDNEENEDILEDIVLTLTLFEDREMIEERLKTYAHLFDDKVMKQLKRRRYTGWGRLSRKLINGIRDKQSGKTILDFLKSDGFANRNFMQLIHDDSLTFKEDIQKAQVSGQGDSLHEHIANLAGSPAIKKGILQTVKVVDELVKVMGRHKPENIVIEMARENQTTQKGQKNSRERMKRIEEGIKELGSQILKEHPVENTQLQNEKLYLYYLQNGRDMYVDQELDINRLSDYDVDAIVPQSFLKDDSIDNKVLTRSDKNRGKSDNVPSEEVVKKMKNYWRQLLNAKLITQRKFDNLTKAERGGLSELDKAGFIKRQLVETRQITKHVAQILDSRMNTKYDENDKLIREVKVITLKSKLVSDFRKDFQFYKVREINNYHHAHDAYLNAVVGTALIKKYPKLESEFVYGDYKVYDVRKMIAKSEQEIGKATAKYFFYSNIMNFFKTEITLANGEIRKRPLIETNGETGEIVWDKGRDFATVRKVLSMPQVNIVKKTEVQTGGFSKESILPKRNSDKLIARKKDWDPKKYGGFDSPTVAYSVLVVAKVEKGKSKKLKSVKELLGITIMERSSFEKNPIDFLEAKGYKEVKKDLIIKLPKYSLFELENGRKRMLASAGELQKGNELALPSKYVNFLYLASHYEKLKGSPEDNEQKQLFVEQHKHYLDEIIEQISEFSKRVILADANLDKVLSAYNKHRDKPIREQAENIIHLFTLTNLGAPAAFKYFDTTIDRKRYTSTKEVLDATLIHQSITGLYETRIDLSQLGGDSGGSKRTADGSEFEPKKKRKV

SEQ ID NO: 131 - protein, 60 aa, Artificial Sequence
  Synthetic
SGGSSGGSSGSETPGTSESATPESAGSYPYDVPDYAGSAAPAAKKKKLDGSGSGGSSGGS

SEQ ID NO: 132 - protein, 678 aa, Artificial Sequence
  Synthetic
TLNIEDEYRLHETSKEPDVSLGSTWLSDFPQAWAETGGMGLAVRQAPLIIPLKATSTPVSIKQYPMSQEARLGIKPHIQRLLDQGILVPCQSPWNTPLLPVKKPGTNDYRPVQDLREVNKRVEDIHPTVPNPYNLLSGLPPSHQWYTVLDLKDAFFCLRLHPTSQPLFAFEWRDPEMGISGQLTWTRLPQGFKNSPTLFDEALHRDLADFRIQHPDLILLQYVDDLLLAATSELDCQQGTRALLQTLGNLGYRASAKKAQICQKQVKYLGYLLKEGQRWLTEARKETVMGQPTPKTPRQLREFLGTAGFCRLWIPGFAEMAAPLYPLTKTGTLFNWGPDQQKAYQEIKQALLTAPALGLPDLTKPFELFVDEKQGYAKGVLTQKLGPWRRPVAYLSKKLDPVAAGWPPCLRMVAAIAVLTKDAGKLTMGQPLVILAPHAVEALVKQPPDRWLSNARMTHYQALLLDTDRVQFGPVVALNPATLLPLPEEGLQHNCLDILAEAHGTRPDLTDQPLPDADHTWYTDGSSLLQEGQRKAGAAVTTETEVIWAKALPAGTSAQRAELIALTQALKMAEGKKLNVYTDSRYAFATAHIHGEIYRRRGLLTSEGKEIKNKDEILALLKALFLPKRLSIIHCPGHQKGHSAEARGNRMADQAARKAAITETPDTSTLLIENSSPS

SEQ ID NO: 133 - protein, 2529 aa, Artificial Sequence
  Synthetic
MKRTADGSEFESPKKKRKVDKKYSIGLDIGTNSVGWAVITDEYKVPSKKFKVLGNTDRHSIKKNLIGALLFDSGETAEATRLKRTARRRYTRRKNRICYLQEIFSNEMAKVDDSFFHRLEESFLVEEDKKHERHPIFGNIVDEVAYHEKYPTIYHLRKKLVDSTDKADLRLIYLALAHMIKFRGHFLIEGDLNPDNSDVDKLFIQLVQTYNQLFEENPINASGVDAKAILSARLSKSRRLENLIAQLPGEKKNGLFGNLIALSLGLTPNFKSNFDLAEDAKLQLSKDTYDDDLDNLLAQIGDQYADLFLAAKNLSDAILLSDILRVNTEITKAPLSASMIKRYDEHHQDLTLLKALVRQQLPEKYKEIFFDQSKNGYAGYIDGGASQEEFYKFIKPILEKMDGTEELLVKLNREDLLRKQRTFDNGSIPHQIHLGELHAILRRQEDFYPFLKDNREKIEKILTFRIPYYVGPLARGNSRFAWMTRKSEETITPWNFEEVVDKGASAQSFIERMTNFDKNLPNEKVLPKHSLLYEYFTVYNELTKVKYVTEGMRKPAFLSGEQKKAIVDLLFKTNRKVTVKQLKEDYFKKIECFDSVEISGVEDRFNASLGTYHDLLKIIKDKDFLDNEENEDILEDIVLTLTLFEDREMIEERLKTYAHLFDDKVMKQLKRRRYTGWGRLSRKLINGIRDKQSGKTILDFLKSDGFANRNFMQLIHDDSLTFKEDIQKAQVSGQGDSLHEHIANLAGSPAIKKGILQTVKVVDELVKVMGRHKPENIVIEMARENQTTQKGQKNSRERMKRIEEGIKELGSQILKEHPVENTQLQNEKLYLYYLQNGRDMYVDQELDINRLSDYDVDAIVPQSFLKDDSIDNKVLTRSDKNRGKSDNVPSEEVVKKMKNYWRQLLNAKLITQRKFDNLTKAERGGLSELDKAGFIKRQLVETRQITKHVAQILDSRMNTKYDENDKLIREVKVITLKSKLVSDFRKDFQFYKVREINNYHHAHDAYLNAVVGTALIKKYPKLESEFVYGDYKVYDVRKMIAKSEQEIGKATAKYFFYSNIMNFFKTEITLANGEIRKRPLIETNGETGEIVWDKGRDFATVRKVLSMPQVNIVKKTEVQTGGFSKESILPKRNSDKLIARKKDWDPKKYGGFDSPTVAYSVLVVAKVEKGKSKKLKSVKELLGITIMERSSFEKNPIDFLEAKGYKEVKKDLIIKLPKYSLFELENGRKRMLASAGELQKGNELALPSKYVNFLYLASHYEKLKGSPEDNEQKQLFVEQHKHYLDEIIEQISEFSKRVILADANLDKVLSAYNKHRDKPIREQAENIIHLFTLTNLGAPAAFKYFDTTIDRKRYTSTKEVLDATLIHQSITGLYETRIDLSQLGGDSGGSSGGSSGSETPGTSESATPESSGGSSGGSSGIQGLAKLIADVAPSAIRENDIKSYFGRKVAIDASMSIYQFLIAVRQGGDVLQNEEGETTSHLMGMFYRTIRMMENGIKPVYVFDGKPPQLKSGELAKRSERRAEAEKQLQQAQAAGAEQEVEKFTKRLVKVTKQHNDECKHLLSLMGIPYLDAPSEAEASCAALVKAGKVYAAATEDMDCLTFGSPVLMRHLTASEAKKLPIQEFHLSRILQELGLNQEQFVDLCILLGSDYCESIRGIGPKRAVDLIQKHKSIEEIVRRLDPNKYPVPENWLHKEAHQLFLEPEVLDPESVELKWSEPNEEELIKFMCGEKQFSEERIRSGVKRLSKSRQGSTQGRLDDFFKVTGSLSSAKRKEPEPKGSTKKKAKTGAAGKFKRGKSGGSSGGSSGSETPGTSESATPESSGGSSGGSSTLNIEDEYRLHETSKEPDVSLGSTWLSDFPQAWAETGGMGLAVRQAPLIIPLKATSTPVSIKQYPMSQEARLGIKPHIQRLLDQGILVPCQSPWNTPLLPVKKPGTNDYRPVQDLREVNKRVEDIHPTVPNPYNLLSGLPPSHQWYTVLDLKDAFFCLRLHPTSQPLFAFEWRDPEMGISGQLTWTRLPQGFKNSPTLFNEALHRDLADFRIQHPDLILLQYVDDLLLAATSELDCQQGTRALLQTLGNLGYRASAKKAQICQKQVKYLGYLLKEGQRWLTEARKETVMGQPTPKTPRQLREFLGKAGFCRLFIPGFAEMAAPLYPLTKPGTLFNWGPDQQKAYQEIKQALLTAPALGLPDLTKPFELFVDEKQGYAKGVLTQKLGPWRRPVAYLSKKLDPVAAGWPPCLRMVAAIAVLTKDAGKLTMGQPLVILAPHAVEALVKQPPDRWLSNARMTHYQALLLDTDRVQFGPVVALNPATLLPLPEEGLQHNCLDILAEAHGTRPDLTDQPLPDADHTWYTDGSSLLQEGQRKAGAAVTTETEVIWAKALPAGTSAQRAELIALTQALKMAEGKKLNVYTDSRYAFATAHIHGEIYRRRGWLTSEGKEIKNKDEILALLKALFLPKRLSIIHCPGHQKGHSAEARGNRMADQAARKAAITETPDTSTLLIENSSPSGGSKRTADGSEFEPKKKRKV

SEQ ID NO: 134 - protein, 379 aa, Homo Sapiens
GIQGLAKLIADVAPSAIRENDIKSYFGRKVAIDASMSIYQFLIAVRQGGDVLQNEEGETTSHLMGMFYRTIRMMENGIKPVYVFDGKPPQLKSGELAKRSERRAEAEKQLQQAQAAGAEQEVEKFTKRLVKVTKQHNDECKHLLSLMGIPYLDAPSEAEASCAALVKAGKVYAAATEDMDCLTFGSPVLMRHLTASEAKKLPIQEFHLSRILQELGLNQEQFVDLCILLGSDYCESIRGIGPKRAVDLIQKHKSIEEIVRRLDPNKYPVPENWLHKEAHQLFLEPEVLDPESVELKWSEPNEEELIKFMCGEKQFSEERIRSGVKRLSKSRQGSTQGRLDDFFKVTGSLSSAKRKEPEPKGSTKKKAKTGAAGKFKRGK

SEQ ID NO: 135 - protein, 1803 aa, Artificial Sequence
  Synthetic
MKRTADGSEFESPKKKRKVGKRNYILGLDIGITSVGYGIIDYETRDVIDAGVRLFKEANVENNEGRRSKRGARRLKRRRRHRIQRVKKLLFDYNLLTDHSELSGINPYEARVKGLSQKLSEEEFSAALLHLAKRRGVHNVNEVEEDTGNELSTKEQISRNSKALEEKYVAELQLERLKKDGEVRGSINRFKTSDYVKEAKQLLKVQKAYHQLDQSFIDTYIDLLETRRTYYEGPGEGSPFGWKDIKEWYEMLMGHCTYFPEELRSVKYAYNADLYNALNDLNNLVITRDENEKLEYYEKFQIIENVFKQKKKPTLKQIAKEILVNEEDIKGYRVTSTGKPEFTNLKVYHDIKDITARKEIIENAELLDQIAKILTIYQSSEDIQEELTNLNSELTQEEIEQISNLKGYTGTHNLSLKAINLILDELWHTNDNQIAIFNRLKLVPKKVDLSQQKEIPTTLVDDFILSPVVKRSFIQSIKVINAIIKKYGLPNDIIIELAREKNSKDAQKMINEMQKRNRQTNERIEEIIRTTGKENAKYLIEKIKLHDMQEGKCLYSLEAIPLEDLLNNPFNYEVDHIIPRSVSFDNSFNNKVLVKQEEASKKGNRTPFQYLSSSDSKISYETFKKHILNLAKGKGRISKTKKEYLLEERDINRFSVQKDFINRNLVDTRYATRGLMNLLRSYFRVNNLDVKVKSINGGFTSFLRRKWKFKKERNKGYKHHAEDALIIANADFIFKEWKKLDKAKKVMENQMFEEKQAESMPEIETEQEYKEIFITPHQIKHIKDFKDYKYSHRVDKKPNRELINDTLYSTRKDDKGNTLIVNNLNGLYDKDNDKLKKLINKSPEKLLMYHHDPQTYQKLKLIMEQYGDEKNPLYKYYEETGNYLTKYSKKDNGPVIKKIKYYGNKLNAHLDITDDYPNSRNKVVKLSLKPYRFDVYLDNGVYKFVTVKNLDVIKKENYYEVNSKCYEEAKKLKKISNQAEFIASFYNNDLIKINGELYRVIGVNNDLLNRIEVNMIDITYREYLENMNDKRPPRIIKTIASKTQSIKKYSTDILGNLYEVKSKKHPQIIKKGSGGSSGGSSGSETPGTSESATPESSGGSSGGSSTLNIEDEYRLHETSKEPDVSLGSTWLSDFPQAWAETGGMGLAVRQAPLIIPLKATSTPVSIKQYPMSQEARLGIKPHIQRLLDQGILVPCQSPWNTPLLPVKKPGTNDYRPVQDLREVNKRVEDIHPTVPNPYNLLSGLPPSHQWYTVLDLKDAFFCLRLHPTSQPLFAFEWRDPEMGISGQLTWTRLPQGFKNSPTLFDEALHRDLADFRIQHPDLILLQYVDDLLLAATSELDCQQGTRALLQTLGNLGYRASAKKAQICQKQVKYLGYLLKEGQRWLTEARKETVMGQPTPKTPRQLREFLGTAGFCRLWIPGFAEMAAPLYPLTKTGTLFNWGPDQQKAYQEIKQALLTAPALGLPDLTKPFELFVDEKQGYAKGVLTQKLGPWRRPVAYLSKKLDPVAAGWPPCLRMVAAIAVLTKDAGKLTMGQPLVILAPHAVEALVKQPPDRWLSNARMTHYQALLLDTDRVQFGPVVALNPATLLPLPEEGLQHNCLDILAEAHGTRPDLTDQPLPDADHTWYTDGSSLLQEGQRKAGAAVTTETEVIWAKALPAGTSAQRAELIALTQALKMAEGKKLNVYTDSRYAFATAHIHGEIYRRRGLLTSEGKEIKNKDEILALLKALFLPKRLSIIHCPGHQKGHSAEARGNRMADQAARKAAITETPDTSTLLIENSSPSGGSKRTADGSEFEPKKKRKV

SEQ ID NO: 136 - protein, 2117 aa, Artificial Sequence
  Synthetic
MKRTADGSEFESPKKKRKVDKKYSIGLDIGTNSVGWAVITDEYKVPSKKFKVLGNTDRHSIKKNLIGALLFDSGETAEATRLKRTARRRYTRRKNRICYLQEIFSNEMAKVDDSFFHRLEESFLVEEDKKHERHPIFGNIVDEVAYHEKYPTIYHLRKKLVDSTDKADLRLIYLALAHMIKFRGHFLIEGDLNPDNSDVDKLFIQLVQTYNQLFEENPINASGVDAKAILSARLSKSRRLENLIAQLPGEKKNGLFGNLIALSLGLTPNFKSNFDLAEDAKLQLSKDTYDDDLDNLLAQIGDQYADLFLAAKNLSDAILLSDILRVNTEITKAPLSASMIKRYDEHHQDLTLLKALVRQQLPEKYKEIFFDQSKNGYAGYIDGGASQEEFYKFIKPILEKMDGTEELLVKLNREDLLRKQRTFDNGSIPHQIHLGELHAILRRQEDFYPFLKDNREKIEKILTFRIPYYVGPLARGNSRFAWMTRKSEETITPWNFEEVVDKGASAQSFIERMTNFDKNLPNEKVLPKHSLLYEYFTVYNELTKVKYVTEGMRKPAFLSGEQKKAIVDLLFKTNRKVTVKQLKEDYFKKIECFDSVEISGVEDRFNASLGTYHDLLKIIKDKDFLDNEENEDILEDIVLTLTLFEDREMIEERLKTYAHLFDDKVMKQLKRRRYTGWGRLSRKLINGIRDKQSGKTILDFLKSDGFANRNFMQLIHDDSLTFKEDIQKAQVSGQGDSLHEHIANLAGSPAIKKGILQTVKVVDELVKVMGRHKPENIVIEMARENQTTQKGQKNSRERMKRIEEGIKELGSQILKEHPVENTQLQNEKLYLYYLQNGRDMYVDQELDINRLSDYDVDAIVPQSFLKDDSIDNKVLTRSDKNRGKSDNVPSEEVVKKMKNYWRQLLNAKLITQRKFDNLTKAERGGLSELDKAGFIKRQLVETRQITKHVAQILDSRMNTKYDENDKLIREVKVITLKSKLVSDFRKDFQFYKVREINNYHHAHDAYLNAVVGTALIKKYPKLESEFVYGDYKVYDVRKMIAKSEQEIGKATAKYFFYSNIMNFFKTEITLANGEIRKRPLIETNGETGEIVWDKGRDFATVRKVLSMPQVNIVKKTEVQTGGFSKESILPKRNSDKLIARKKDWDPKKYGGFVSPTVAYSVLVVAKVEKGKSKKLKSVKELLGITIMERSSFEKNPIDFLEAKGYKEVKKDLIIKLPKYSLFELENGRKRMLASARELQKGNELALPSKYVNFLYLASHYEKLKGSPEDNEQKQLFVEQHKHYLDEIIEQISEFSKRVILADANLDKVLSAYNKHRDKPIREQAENIIHLFTLTNLGAPAAFKYFDTTIDRKQYRSTKEVLDATLIHQSITGLYETRIDLSQLGGDSGGSSGGSSGSETPGTSESATPESSGGSSGGSSTLNIEDEYRLHETSKEPDVSLGSTWLSDFPQAWAETGGMGLAVRQAPLIIPLKATSTPVSIKQYPMSQEARLGIKPHIQRLLDQGILVPCQSPWNTPLLPVKKPGTNDYRPVQDLREVNKRVEDIHPTVPNPYNLLSGLPPSHQWYTVLDLKDAFFCLRLHPTSQPLFAFEWRDPEMGISGQLTWTRLPQGFKNSPTLFNEALHRDLADFRIQHPDLILLQYVDDLLLAATSELDCQQGTRALLQTLGNLGYRASAKKAQICQKQVKYLGYLLKEGQRWLTEARKETVMGQPTPKTPRQLREFLGKAGFCRLFIPGFAEMAAPLYPLTKPGTLFNWGPDQQKAYQEIKQALLTAPALGLPDLTKPFELFVDEKQGYAKGVLTQKLGPWRRPVAYLSKKLDPVAAGWPPCLRMVAAIAVLTKDAGKLTMGQPLVILAPHAVEALVKQPPDRWLSNARMTHYQALLLDTDRVQFGPVVALNPATLLPLPEEGLQHNCLDILAEAHGTRPDLTDQPLPDADHTWYTDGSSLLQEGQRKAGAAVTTETEVIWAKALPAGTSAQRAELIALTQALKMAEGKKLNVYTDSRYAFATAHIHGEIYRRRGWLTSEGKEIKNKDEILALLKALFLPKRLSIIHCPGHQKGHSAEARGNRMADQAARKAAITETPDTSTLLIENSSPSGGSKRTADGSEFEPKKKRKV

SEQ ID NO: 137 - protein, 2117 aa, Artificial Sequence
  Synthetic
MKRTADGSEFESPKKKRKVDKKYSIGLDIGTNSVGWAVITDEYKVPSKKFKVLGNTDRHSIKKNLIGALLFDSGETAEATRLKRTARRRYTRRKNRICYLQEIFSNEMAKVDDSFFHRLEESFLVEEDKKHERHPIFGNIVDEVAYHEKYPTIYHLRKKLVDSTDKADLRLIYLALAHMIKFRGHFLIEGDLNPDNSDVDKLFIQLVQTYNQLFEENPINASGVDAKAILSARLSKSRRLENLIAQLPGEKKNGLFGNLIALSLGLTPNFKSNFDLAEDAKLQLSKDTYDDDLDNLLAQIGDQYADLFLAAKNLSDAILLSDILRVNTEITKAPLSASMIKRYDEHHQDLTLLKALVRQQLPEKYKEIFFDQSKNGYAGYIDGGASQEEFYKFIKPILEKMDGTEELLVKLNREDLLRKQRTFDNGSIPHQIHLGELHAILRRQEDFYPFLKDNREKIEKILTFRIPYYVGPLARGNSRFAWMTRKSEETITPWNFEEVVDKGASAQSFIERMTNFDKNLPNEKVLPKHSLLYEYFTVYNELTKVKYVTEGMRKPAFLSGEQKKAIVDLLFKTNRKVTVKQLKEDYFKKIECFDSVEISGVEDRFNASLGTYHDLLKIIKDKDFLDNEENEDILEDIVLTLTLFEDREMIEERLKTYAHLFDDKVMKQLKRRRYTGWGRLSRKLINGIRDKQSGKTILDFLKSDGFANRNFMQLIHDDSLTFKEDIQKAQVSGQGDSLHEHIANLAGSPAIKKGILQTVKVVDELVKVMGRHKPENIVIEMARENQTTQKGQKNSRERMKRIEEGIKELGSQILKEHPVENTQLQNEKLYLYYLQNGRDMYVDQELDINRLSDYDVDAIVPQSFLKDDSIDNKVLTRSDKNRGKSDNVPSEEVVKKMKNYWRQLLNAKLITQRKFDNLTKAERGGLSELDKAGFIKRQLVETRQITKHVAQILDSRMNTKYDENDKLIREVKVITLKSKLVSDFRKDFQFYKVREINNYHHAHDAYLNAVVGTALIKKYPKLESEFVYGDYKVYDVRKMIAKSEQEIGKATAKYFFYSNIMNFFKTEITLANGEIRKRPLIETNGETGEIVWDKGRDFATVRKVLSMPQVNIVKKTEVQTGGFSKESILPKRNSDKLIARKKDWDPKKYGGFVSPTVAYSVLVVAKVEKGKSKKLKSVKELLGITIMERSSFEKNPIDFLEAKGYKEVKKDLIIKLPKYSLFELENGRKRMLASARELQKGNELALPSKYVNFLYLASHYEKLKGSPEDNEQKQLFVEQHKHYLDEIIEQISEFSKRVILADANLDKVLSAYNKHRDKPIREQAENIIHLFTLTNLGAPAAFKYFDTTIDRKEYRSTKEVLDATLIHQSITGLYETRIDLSQLGGDSGGSSGGSSGSETPGTSESATPESSGGSSGGSSTLNIEDEYRLHETSKEPDVSLGSTWLSDFPQAWAETGGMGLAVRQAPLIIPLKATSTPVSIKQYPMSQEARLGIKPHIQRLLDQGILVPCQSPWNTPLLPVKKPGTNDYRPVQDLREVNKRVEDIHPTVPNPYNLLSGLPPSHQWYTVLDLKDAFFCLRLHPTSQPLFAFEWRDPEMGISGQLTWTRLPQGFKNSPTLFNEALHRDLADFRIQHPDLILLQYVDDLLLAATSELDCQQGTRALLQTLGNLGYRASAKKAQICQKQVKYLGYLLKEGQRWLTEARKETVMGQPTPKTPRQLREFLGKAGFCRLFIPGFAEMAAPLYPLTKPGTLFNWGPDQQKAYQEIKQALLTAPALGLPDLTKPFELFVDEKQGYAKGVLTQKLGPWRRPVAYLSKKLDPVAAGWPPCLRMVAAIAVLTKDAGKLTMGQPLVILAPHAVEALVKQPPDRWLSNARMTHYQALLLDTDRVQFGPVVALNPATLLPLPEEGLQHNCLDILAEAHGTRPDLTDQPLPDADHTWYTDGSSLLQEGQRKAGAAVTTETEVIWAKALPAGTSAQRAELIALTQALKMAEGKKLNVYTDSRYAFATAHIHGEIYRRRGWLTSEGKEIKNKDEILALLKALFLPKRLSIIHCPGHQKGHSAEARGNRMADQAARKAAITETPDTSTLLIENSSPSGGSKRTADGSEFEPKKKRKV

SEQ ID NO: 138 - protein, 5 aa, Artificial Sequence
  Synthetic
  REPEAT (1)..(5): may repeat up to 30 times
GGGGS

SEQ ID NO: 139 - protein, 1 aa, Artificial Sequence
  Synthetic
  REPEAT (1)..(1): may repeat up to 30 times
G

SEQ ID NO: 140 - protein, 3 aa, Artificial Sequence
  Synthetic
  REPEAT (1)..(3): may repeat up to 30 times
GGS

SEQ ID NO: 141 - protein, 2 aa, Artificial Sequence
  Synthetic
  misc_feature (1)..(1): Xaa can be any naturally occurring amino acid
  REPEAT (1)..(2): may repeat up to 30 times
XP

SEQ ID NO: 142 - protein, 16 aa, Artificial Sequence
  Synthetic
SGSETPGTSESATPES

SEQ ID NO: 143 - protein, 32 aa, Artificial Sequence
  Synthetic
SGGSSGGSSGSETPGTSESATPESSGGSSGGS

SEQ ID NO: 144 - protein, 10 aa, Artificial Sequence
  Synthetic
SGGSGGSGGS

SEQ ID NO: 145 - protein, 6 aa, Artificial Sequence
  Synthetic
GGSGGS

SEQ ID NO: 146 - protein, 9 aa, Artificial Sequence
  Synthetic
GGSGGSGGS

SEQ ID NO: 147 - protein, 20 aa, Artificial Sequence
  Synthetic
AVKRPAATKKAGQAKKKKLD

SEQ ID NO: 148 - protein, 25 aa, Artificial Sequence
  Synthetic
MSRRRKANPTKLSENAKKLAKEVEN

SEQ ID NO: 149 - protein, 9 aa, Artificial Sequence
  Synthetic
PAAKRVKLD

SEQ ID NO: 150 - protein, 9 aa, Artificial Sequence
  Synthetic
KLKIKRPVK

SEQ ID NO: 151 - protein, 8 aa, Artificial Sequence
  Synthetic
VSRKRPRP

SEQ ID NO: 152 - protein, 10 aa, Artificial Sequence
  Synthetic
EGAPPAKRAR

SEQ ID NO: 153 - protein, 12 aa, Artificial Sequence
  Synthetic
PPQPKKKPLDGE

SEQ ID NO: 154 - protein, 18 aa, Artificial Sequence
  Synthetic
KRTADGSEFESPKKKRKV

SEQ ID NO: 155 - protein, 17 aa, Artificial Sequence
  Synthetic
KRTADGSEFEPKKKRKV

SEQ ID NO: 156 - protein, 19 aa, Artificial Sequence
  Synthetic
NLSKRPAAIKKAGQAKKKK

SEQ ID NO: 157 - protein, 11 aa, Artificial Sequence
  Synthetic
RQRRNELKRSF

SEQ ID NO: 158 - protein, 38 aa, Artificial Sequence
  Synthetic
NQSSNFGPMKGGNFGGRSSGPYGGGGQYFAKPRNQGGY

SEQ ID NO: 159 - protein, 16 aa, Unknown
  Xenopus nucleoplasmin
  misc_feature (3)..(12): Xaa can be any naturally occurring amino acid
KRXXXXXXXXXXKKKL

SEQ ID NO: 160 - protein, 380 aa, Artificial Sequence
  Synthetic
MGIQGLAKLIADVAPSAIRENDIKSYFGRKVAIDASMSIYQFLIAVRQGGDVLQNEEGETTSHLMGMFYRTIRMMENGIKPVYVFDGKPPQLKSGELAKRSERRAEAEKQLQQAQAAGAEQEVEKFTKRLVKVTKQHNDECKHLLSLMGIPYLDAPSEAEASCAALVRAGKVYAAATEDMDCLTFGSPVLMRHLTASEAKKLPIQEFHLSRILQELGLNQEQFVDLCILLGSDYCESIRGIGPKRAVDLIQKHKSIEEIVRRLDPNKYPVPENWLHKEAHQLFLEPEVLDPESVELKWSEPNEEELIKFMCGEKQFSEERIRSGVKRLSKSRQGSTQGRLDDFFKVTGSLSSAKRKEPEPKGSTKKKAKTGAAGKFKRGK

SEQ ID NO: 161 - protein, 380 aa, Artificial Sequence
  Synthetic
MGIQGLAKLIADVAPSAIRENDIKSYFGRKVAIDASMSIYQFLIAVRQGGDVLQNEEGETTSHLMGMFYRTIRMMENGIKPVYVFDGKPPQLKSGELAKRSERRAEAEKQLQQAQAAGAEQEVEKFTKRLVKVTKQHNDECKHLLSLMGIPYLDAPSEAEASCAALVKAGKVYAAATEDMDCLTFGAPVLMRHLTASEAKKLPIQEFHLSRILQELGLNQEQFVDLCILLGSDYCESIRGIGPKRAVDLIQKHKSIEEIVRRLDPNKYPVPENWLHKEAHQLFLEPEVLDPESVELKWSEPNEEELIKFMCGEKQFSEERIRSGVKRLSKSRQGSTQGRLDDFFKVTGSLSSAKRKEPEPKGSTKKKAKTGAAGKFKRGK

SEQ ID NO: 162 - protein, 380 aa, Artificial Sequence
  Synthetic
MGIQGLAKLIADVAPSAIRENDIKSYFGRKVAIDASMSIYQFLIAVRQGGDVLQNEEGETTSHLMGMFYRTIRMMENGIKPVYVFDGKPPQLKSGELAKRSERRAEAEKQLQQAQAAGAEQEVEKFTKRLVKVTKQHNDECKHLLSLMGIPYLDAPSEAEASCAALVKAGKVYAAATEDMDCLTFGSPVLMRHLTASEAKKLPIQEFHLSRILQELGLNQEQFVDLCILLGSDYCESIRGIGPKRAVDLIQKHKSIEEIVRRLDPNKYPVPENWLHKEAHQLFLEPEVLDPESVELKWSEPNEEELIKFMCGEKQFSEERIRSGVKRLSKSRQGSTQGRLDDFFKVTGSLSSARRKEPEPKGSTKKKAKTGAAGKFKRGK

SEQ ID NO: 163 - protein, 908 aa, Artificial Sequence
  Synthetic
MGVNDLWQILEPVKQHIPLRNLGGKTIAVDLSLWVCEAQTVKKMMGSVMKPHLRNLFFRISYLTQMDVKLVFVMEGEPPKLKADVISKRNQSRYGSSGKSWSQKTGRSHFKSVLRECLHMLECLGIPWVQAAGEAEAMCAYLNAGGHVDGCLTNDGDTFLYGAQTVYRNFTMNTKDPHVDCYTMSSIKSKLGLDRDALVGLAILLGCDYLPKGVPGVGKEQALKLIQILKGQSLLQRFNRWNETSCNSSPQLLVTKKLAHCSVCSHPGSPKDHERNGCRLCKSDKYCEPHDYEYCCPCEWHRTEHDRQLSEVENNIKKKACCCEGFPFHEVIQEFLLNKDKLVKVIRYQRPDLLLFQRFTLEKMEWPNHYACEKLLVLLTHYDMIERKLGSRNSNQLQPIRIVKTRIRNGVHCFEIEWEKPEHYAMEDKQHGEFALLTIEEESLFEAAYPEIVAVYQKQKLEIKGKKQKRIKPKENNLPEPDEVMSFQSHMTLKPTCEIFHKQNSKLNSGISPDPTLPQESISASLNSLLLPKNTPCLNAQEQFMSSLRPLAIQQIKAVSKSLISESSQPNTSSHNISVIADLHLSTIDWEGTSFSNSPAIQRNTFSHDLKSEVESELSAIPDGFENIPEQLSCESERYTANIKKVLDEDSDGISPEEHLLSGITDLCLQDLPLKERIFTKLSYPQDNLQPDVNLKTLSILSVKESCIANSGSDCTSHLSKDLPGIPLQNESRDSKILKGDQLLQEDYKVNTSVPYSVSNTVVKTCNVRPPNTALDHSRKVDMQTTRKILMKKSVCLDRHSSDEQSAPVFGKAKYTTQRMKHSSQKHNSSHFKESGHNKLSSPKIHIKETEQCVRSYETAENEESCFPDSTKSSLSSLQCHKKENNSGTCLDSPLPLRQRLKLRFQST

SEQ ID NO: 164 - protein, 1186 aa, Artificial Sequence
  Synthetic
MGVQGLWKLLECSGRQVSPEALEGKILAVDISIWLNQALKGVRDRHGNSIENPHLLTLFHRLCKLLFFRIRPIFVFDGDAPLLKKQTLVKRRQRKDLASSDSRKTTEKLLKTFLKRQAIKTAFRSKRDEALPSLTQVRRENDLYVLPPLQEEEKHSSEEEDEKEWQERMNQKQALQEEFFHNPQAIDIESEDFSSLPPEVKHEILTDMKEFTKRRRTLFEAMPEESDDFSQYQLKGLLKKNYLNQHIEHVQKEMNQQHSGHIRRQYEDEGGFLKEVESRRVVSEDTSHYILIKGIQAKTVAEVDSESLPSSSKMHGMSFDVKSSPCEKLKTEKEPDATPPSPRTLLAMQAALLGSSSEEELESENRRQARGRNAPAAVDEGSISPRTLSAIKRALDDDEDVKVCAGDDVQTGGPGAEEMRINSSTENSDEGLKVRDGKGIPFTATLASSSVNSAEEHVASTNEGREPTDSVPKEQMSLVHVGTEAFPISDESMIKDRKDRLPLESAVVRHSDAPGLPNGRELTPASPTCTNSVSKNETHAEVLEQQNELCPYESKFDSSLLSSDDETKCKPNSASEVIGPVSLQETSSIVSVPSEAVDNVENVVSFNAKEHENFLETIQEQQTTESAGQDLISIPKAVEPMEIDSEESESDGSFIEVQSVISDEELQAEFPETSKPPSEQGEEELVGTREGEAPAESESLLRDNSERDDVDGEPQEAEKDAEDSLHEWQDINLEELETLESNLLAQQNSLKAQKQQQERIAATVTGQMFLESQELLRLFGIPYIQAPMEAEAQCAILDLTDQTSGTITDDSDIWLFGARHVYRNFFNKNKFVEYYQYVDFHNQLGLDRNKLINLAYLLGSDYTEGIPTVGCVTAMEILNEFPGHGLEPLLKFSEWWHEAQKNPKIRPNPHDTKVKKKLRTLQLTPGFPNPAVAEAYLKPVVDDSKGSFLWGKPDLDKIREFCQRYFGWNRTKTDESLFPVLKQLDAQQTQLRIDSFFRLAQQEKEDAKRIKSQRLNRAVTCMLRKEKEAAASEIEAVSVAMEKEFELLDKAKRKTQKRGITNTLEESSSLKRKRLSDSKRKNTCGGFLGETCLSESSDGSSSEDAESSSLMNVQRRTAAKEPKTSASDSQNSVKEAPVKNGGATTSSSSDSDDDGGKEKMVLVTARSVFGKKRRKLRRARGRKRKT

SEQ ID NO: 165 - protein, 236 aa, Homo Sapiens
MSEAPRAETFVFLDLEATGLPSVEPEIAELSLFAVHRSSLENPEHDESGALVLPRVLDKLTLCMCPERPFTAKASEITGLSSEGLARCRKAGFDGAVVRTLQAFLSRQAGPICLVAHNGFDYDFPLLCAELRRLGARLPRDTVCLDTLPALRGLDRAHSHGTRARGRQGYSLGSLFHRYFRAEPSAAHSAEGDVHTLLLIFLHRAAELLAWADEQARGWAHIEPMYLPPDDPSLEA

SEQ ID NO: 166 - protein, 236 aa, Mus musculus
MSEPPRAETFVFLDLEATGLPNMDPEIAEISLFAVHRSSLENPERDDSGSLVLPRVLDKLTLCMCPERPFTAKASEITGLSSESLMHCGKAGFNGAVVRTLQGFLSRQEGPICLVAHNGFDYDFPLLCTELQRLGAHLPQDTVCLDTLPALRGLDRAHSHGTRAQGRKSYSLASLFHRYFQAEPSAAHSAEGDVHTLLLIFLHRAPELLAWADEQARSWAHIEPMYVPPDGPSLEA

SEQ ID NO: 167 - protein, 236 aa, Rattus norvegius
MSEPLRAETFVFLDLEATGLPNMDPEIAEISLFAVHRSSLENPERDDSGSLVLPRVLDKLTLCMCPERPFTAKASEITGLSSEGLMNCRKAAFNDAVVRTLQGFLSRQEGPICLVAHNGFDYDFPLLCTELQRLGAHLPRDTVCLDTLPALRGLDRVHSHGTRAQGRKSYSLASLFHRYFQAEPSAAHSAEGDVNTLLLIFLHRAPELLAWADEQARSWAHIEPMYVPPDGPSLEA

SEQ ID NO: 168 - protein, 803 aa, Homo Sapiens
MGIQGLLQFIKEASEPIHVRKYKGQVVAVDTYCWLHKGAIACAEKLAKGEPTDRYVGFCMKFVNMLLSHGIKPILVFDGCTLPSKKEVERSRRERRQANLLKGKQLLREGKVSEARECFTRSINITHAMAHKVIKAARSQGVDCLVAPYEADAQLAYLNKAGIVQAIITEDSDLLAFGCKKVILKMDQFGNGLEIDQARLGMCRQLGDVFTEEKFRYMCILSGCDYLSSLRGIGLAKACKVLRLANNPDIVKVIKKIGHYLKMNITVPEDYINGFIRANNTFLYQLVFDPIKRKLIPLNAYEDDVDPETLSYAGQYVDDSIALQIALGNKDINTFEQIDDYNPDTAMPAHSRSHSWDDKTCQKSANVSSIWHRNYSPRPESGTVSDAPQLKENPSTVGVERVISTKGLNLPRKSSIVKRPRSAELSEDDLLSQYSLSFTKKTKKNSSEGNKSLSFSEVFVPDLVNGPTNKKSVSTPPRTRNKFATFLQRKNEESGAVVVPGTRSRFFCSSDSTDCVSNKVSIQPLDETAVTDKENNLHESEYGDQEGKRLVDTDVARNSSDDIPNNHIPGDHIPDKATVFTDEESYSFESSKFTRTISPPTLGTLRSCFSWSGGLGDFSRTPSPSPSTALQQFRRKSDSPTSLPENNMSDVSQLKSEESSDDESHPLREEACSSQSQESGEFSLQSSNASKLSQCSSKDSDSEESDCNIKLLDSQSDQTSKLRLSHFSKKDTPLRNKVPGLYKSSSADSLSTTKIKPLGPARASGLSKKPASIQKRKHHNAENKPGLQIKLNELWKNFGFKKF

SEQ ID NO: 169 - protein, 846 aa, Homo Sapiens
MGIQGLLQFIKEASEPIHVRKYKGQVVAVDTYCWLHKGAIACAEKLAKGEPTDRYVGFCMKFVNMLLSHGIKPILVFDGCTLPSKKEVERSRRERRQANLLKGKQLLREGKVSEARECFTRSINITHAMAHKVIKAARSQGVDCLVAPYEADAQLAYLNKAGIVQAIITEDSDLLAFGCKKVILKMDQFGNGLEIDQARLGMCRQLGDVFTEEKFRYMCILSGCDYLSSLRGIGLAKACKVLRLANNPDIVKVIKKIGHYLKMNITVPEDYINGFIRANNTFLYQLVFDPIKRKLIPLNAYEDDVDPETLSYAGQYVDDSIALQIALGNKDINTFEQIDDYNPDTAMPAHSRSHSWDDKTCQKSANVSSIWHRNYSPRPESGTVSDAPQLKENPSTVGVERVISTKGLNLPRKSSIVKRPRSAELSEDDLLSQYSLSFTKKTKKNSSEGNKSLSFSEVFVPDLVNGPTNKKSVSTPPRTRNKFATFLQRKNEESGAVVVPGTRSRFFCSSDSTDCVSNKVSIQPLDETAVTDKENNLHESEYGDQEGKRLVDTDVARNSSDDIPNNHIPGDHIPDKATVFTDEESYSFESSKFTRTISPPTLGTLRSCFSWSGGLGDFSRTPSPSPSTALQQFRRKSDSPTSLPENNMSDVSQLKSEESSDDESHPLREEACSSQSQESGEFSLQSSNASKLSQCSSKDSDSEESDCNIKLLDSQSDQTSKLRLSHFSKKDTPLRNKVPGLYKSSSADSLSTTKIKPLGPARASGLSKKPASIQKRKHHNAENKPGLQIKLNELWKNFGFKKDSEKLPPCKKPLSPVRDNIQLTPEAEEDIFNKPECGRVQRAIFQ

SEQ ID NO: 170 - protein, 845 aa, Homo Sapiens
MGIQGLLQFIKEASEPIHVRKYKGQVVAVDTYCWLHKGAIACAEKLAKGEPTDRYVGFCMKFVNMLLSHGIKPILVFDGCTLPSKKEVERSRRERRQANLLKGKQLLREGKVSEARECFTRSINITHAMAHKVIKAARSQGVDCLVAPYEADAQLAYLNKAGIVQAIITEDSDLLAFGCKKVILKMDQFGNGLEIDQARLGMCRQLGDVFTEEKFRYMCILSGCDYLSSLRGIGLAKACKVLRLANNPDIVKVIKKIGHYLKMNITVPEDYINGFIRANNTFLYQLVFDPIKRKLIPLNAYEDDVDPETLSYAGQYVDDSIALQIALGNKDINTFEQIDDYNPDTAMPAHSRSHSWDDKTCQKSANVSSIWHRNYSPRPESGTVSDAPQLKENPSTVGVERVISTKGLNLPRKSSIVKRPRSELSEDDLLSQYSLSFTKKTKKNSSEGNKSLSFSEVFVPDLVNGPTNKKSVSTPPRTRNKFATFLQRKNEESGAVVVPGTRSRFFCSSDSTDCVSNKVSIQPLDETAVTDKENNLHESEYGDQEGKRLVDTDVARNSSDDIPNNHIPGDHIPDKATVFTDEESYSFESSKFTRTISPPTLGTLRSCFSWSGGLGDFSRTPSPSPSTALQQFRRKSDSPTSLPENNMSDVSQLKSEESSDDESHPLREEACSSQSQESGEFSLQSSNASKLSQCSSKDSDSEESDCNIKLLDSQSDQTSKLRLSHFSKKDTPLRNKVPGLYKSSSADSLSTTKIKPLGPARASGLSKKPASIQKRKHHNAENKPGLQIKLNELWKNFGFKKDSEKLPPCKKPLSPVRDNIQLTPEAEEDIFNKPECGRVQRAIFQ

SEQ ID NO: 171 - protein, 84 aa, Artificial Sequence
  Synthetic
MTNLSDIIEKETGKQLVIQESILMLPEEVEEVIGNKPESDILVHTAYDESTDENVMLLTSDAPEYKPWALVIQDSNGENKIKML

SEQ ID NO: 172 - protein, 345 aa, Homo Sapiens
MPARALLPRRMGHRTLASTPALWASIPCPRSELRLDLVLPSGQSFRWREQSPAHWSGVLADQVWTLTQTEEQLHCTVYRGDKSQASRPTPDELEAVRKYFQLDVTLAQLYHHWGSVDSHFQEVAQKFQGVRLLRQDPIECLFSFICSSNNNIARITGMVERLCQAFGPRLIQLDDVTYHGFPSLQALAGPEVEAHLRKLGLGYRARYVSASARAILEEQGGLAWLQQLRESSYEEAHKALCILPGVGTKVADCICLMALDKPQAVPVDVHMWHIAQRDYSWHPTTSQAKGPSPQTNKELGNFFRSLWGPYAGWAQAVLFSADLRQSRHAQEPPAKRRKGSKGPEG

SEQ ID NO: 173 - protein, 298 aa, Homo Sapiens
MVTPALQMKKPKQFCRRMGQKKQRPARAGQPHSSSDAAQAPAEQPHSSSDAAQAPCPRERCLGPPTTPGPYRSIYFSSPKGHLTRLGLEFFDQPAVPLARAFLGQVLVRRLPNGTELRGRIVETEAYLGPEDEAAHSRGGRQTPRNRGMFMKPGTLYVYIIYGMYFCMNISSQGDGACVLLRALEPLEGLETMRQLRSTLRKGTASRVLKDRELCSGPSKLCQALAINKSFDQRDLAQDEAVWLERGPLEPSEPAVVAAARVGVGHAGEWARKPLRFYVRGSPWVSVVDRVAEQDTQA

SEQ ID NO: 174 - protein, 580 aa, Homo Sapiens
MGTTGLESLSLGDRGAAPTVTSSERLVPDPPNDLRKEDVAMELERVGEDEEQMMIKRSSECNPLLQEPIASAQFGATAGTECRKSVPCGWERVVKQRLFGKTAGRFDVYFISPQGLKFRSKSSLANYLHKNGETSLKPEDFDFTVLSKRGIKSRYKDCSMAALTSHLQNQSNNSNWNLRTRSKCKKDVFMPPSSSSELQESRGLSNFTSTHLLLKEDEGVDDVNFRKVRKPKGKVTILKGIPIKKTKKGCRKSCSGFVQSDSKRESVCNKADAESEPVAQKSQLDRTVCISDAGACGETLSVTSEENSLVKKKERSLSSGSNFCSEQKTSGIINKFCSAKDSEHNEKYEDTFLESEEIGTKVEVVERKEHLHTDILKRGSEMDNNCSPTRKDFTGEKIFQEDTIPRTQIERRKTSLYFSSKYNKEALSPPRRKAFKKWTPPRSPFNLVQETLFHDPWKLLIATIFLNRTSGKMAIPVLWKFLEKYPSAEVARTADWRDVSELLKPLGLYDLRAKTIVKFSDEYLTKQWKYPIELHGIGKYGNDSYRIFCVNEWKQVHPEDHKLNKYHDWLWENHEKLSLS

SEQ ID NO: 175 - protein, 410 aa, Homo Sapiens
MEAENAGSYSLQQAQAFYTFPFQQLMAEAPNMAVVNEQQMPEEVPAPAPAQEPVQEAPKGRKRKPRTTEPKQPVEPKKPVESKKSGKSAKSKEKQEKITDTFKVKRKVDRFNGVSEAELLTKTLPDILTFNLDIVIIGINPGLMAAYKGHHYPGPGNHFWKCLFMSGLSEVQLNHMDDHTLPGKYGIGFTNMVERTTPGSKDLSSKEFREGGRILVQKLQKYQPRIAVFNGKCIYEIFSKEVFGVKVKNLEFGLQPHKIPDTETLCYVMPSSSARCAQFPRAQDKVHYYIKLKDLRDQLKGIERNMDVQEVQYTFDLQLAQEDAKKMAVKEEKYDPGYEAAYGGAYGENPCSSEPCGFSSNGLIESVELRGESAFSGIPNGQWMTQSFTDQIPSFSNHCGTQEQEEESHA

SEQ ID NO: 176 - DNA, 23 bp, Artificial Sequence
  Synthetic
  misc_feature (1)..(21): n is a, c, g, or t
nnnnnnnnnnnnnnnnnnnnngg

SEQ ID NO: 177 - DNA, 15 bp, Artificial Sequence
  Synthetic
  misc_feature (1)..(13): n is a, c, g, or t
nnnnnnnnnnnnngg

SEQ ID NO: 178 - DNA, 23 bp, Artificial Sequence
  Synthetic
  misc_feature (1)..(21): n is a, c, g, or t
nnnnnnnnnnnnnnnnnnnnngg

SEQ ID NO: 179 - DNA, 14 bp, Artificial Sequence
  Synthetic
  misc_feature (1)..(12): n is a, c, g, or t
nnnnnnnnnnnngg

SEQ ID NO: 180 - DNA, 27 bp, Artificial Sequence
  Synthetic
  misc_feature (1)..(22): n is a, c, g, or t
nnnnnnnnnnnnnnnnnnnnnnagaaw

SEQ ID NO: 181 - DNA, 19 bp, Artificial Sequence
  Synthetic
  misc_feature (1)..(14): n is a, c, g, or t
nnnnnnnnnnnnnnagaaw

SEQ ID NO: 182 - DNA, 27 bp, Artificial Sequence
  Synthetic
  misc_feature (1)..(22): n is a, c, g, or t
nnnnnnnnnnnnnnnnnnnnnnagaaw

SEQ ID NO: 183 - DNA, 18 bp, Artificial Sequence
  Synthetic
  misc_feature (1)..(13): n is a, c, g, or t
nnnnnnnnnnnnnagaaw

SEQ ID NO: 184 - DNA, 25 bp, Artificial Sequence
  Synthetic
  misc_feature (1)..(21): n is a, c, g, or t
  misc_feature (24)..(24): n is a, c, g, or t
nnnnnnnnnnnnnnnnnnnnnggng

SEQ ID NO: 185 - DNA, 17 bp, Artificial Sequence
  Synthetic
  misc_feature (1)..(13): n is a, c, g, or t
  misc_feature (16)..(16): n is a, c, g, or t
nnnnnnnnnnnnnggng

SEQ ID NO: 186 - DNA, 25 bp, Artificial Sequence
  Synthetic
  misc_feature (1)..(21): n is a, c, g, or t
  misc_feature (24)..(24): n is a, c, g, or t
nnnnnnnnnnnnnnnnnnnnnggng

SEQ ID NO: 187 - DNA, 16 bp, Artificial Sequence
  Synthetic
  misc_feature (1)..(12): n is a, c, g, or t
  misc_feature (15)..(15): n is a, c, g, or t
nnnnnnnnnnnnggng

SEQ ID NO: 188 - DNA, 125 bp, Artificial Sequence
  Synthetic
  misc_feature (1)..(8): n is a, c, g, or t
nnnnnnnngtttttgtactctcaagatttagaaataaatcttgcagaagctacaaagataaggcttcatgccgaaatcaacaccctgtcattttatggcagggtgttttcgttatttaatttttt

SEQ ID NO: 189 - DNA, 121 bp, Artificial Sequence
  Synthetic
  misc_feature (1)..(18): n is a, c, g, or t
nnnnnnnnnnnnnnnnnngtttttgtactctcagaaatgcagaagctacaaagataaggcttcatgccgaaatcaacaccctgtcattttatggcagggtgttttcgttatttaatttttt

SEQ ID NO: 190 - DNA, 109 bp, Artificial Sequence
  Synthetic
  misc_feature (1)..(20): n is a, c, g, or t
nnnnnnnnnnnnnnnnnnnngtttttgtactctcagaaatgcagaagctacaaagataaggcttcatgccgaaatcaacaccctgtcattttatggcagggtgtttttt

SEQ ID NO: 191 - DNA, 102 bp, Artificial Sequence
  Synthetic
  misc_feature (1)..(20): n is a, c, g, or t
nnnnnnnnnnnnnnnnnnnngttttagagctagaaatagcaagttaaaataaggctagtccgttatcaacttgaaaaagtggcaccgagtcggtgctttttt

SEQ ID NO: 192 - DNA, 88 bp, Artificial Sequence
  Synthetic
  misc_feature (1)..(20): n is a, c, g, or t
nnnnnnnnnnnnnnnnnnnngttttagagctagaaatagcaagttaaaataaggctagtccgttatcaacttgaaaaagtgttttttt

SEQ ID NO: 193 - DNA, 76 bp, Artificial Sequence
  Synthetic
  misc_feature (1)..(20): n is a, c, g, or t
nnnnnnnnnnnnnnnnnnnngttttagagctagaaatagcaagttaaaataaggctagtccgttatcatttttttt

SEQ ID NO: 194 - RNA, 82 nt, Artificial Sequence
  Synthetic
guuuuagagcuagaaauagcaaguuaaaauaaaggcuaguccguuaucaacuugaaaaaguggcaccgagucggugcuuuuu

SEQ ID NO: 195 - DNA, 56 bp, Artificial Sequence
  Synthetic
gggtcaggagccccccccctgaacccaggataaccctcaaagtcggggggcaaccc

SEQ ID NO: 196 - DNA, 51 bp, Artificial Sequence
  Synthetic
gggtcaggagccccccccctgaacccaggataaccctcaaagtcggggggc

SEQ ID NO: 197 - DNA, 60 bp, Artificial Sequence
  Synthetic
gtcagggtcaggagccccccccctgaacccaggataaccctcaaagtcggggggcaaccc

SEQ ID NO: 198 - DNA, 56 bp, Artificial Sequence
  Synthetic
gggtcaggagccccccccctgaacccaggaaaaccctcaaagtcggggggcaaccc

SEQ ID NO: 199 - DNA, 56 bp, Artificial Sequence
  Synthetic
gggtcaggagccccccccctgcacccaggaaaaccctcaaagtcggggggcaaccc

SEQ ID NO: 200 - DNA, 56 bp, Artificial Sequence
  Synthetic
gggtcaggagccccccccctgcacccaggataaccctcaaagtcggggggcaaccc

SEQ ID NO: 201 - DNA, 60 bp, Artificial Sequence
  Synthetic
gtcagggtcaggagccccccccctgaacccaggaaaaccctcaaagtcggggggcaaccc

SEQ ID NO: 202 - DNA, 60 bp, Artificial Sequence
  Synthetic
gtcagggtcaggagccccccccctgcacccaggaaaaccctcaaagtcggggggcaaccc

SEQ ID NO: 203 - DNA, 60 bp, Artificial Sequence
  Synthetic
gtcagggtcaggagccccccccctgcacccaggataaccctcaaagtcggggggcaaccc

SEQ ID NO: 204 - DNA, 19 bp, Artificial Sequence
  Synthetic
gggctgggatgggaaaggg

SEQ ID NO: 205 - DNA, 20 bp, Artificial Sequence
  Synthetic
gggacagggcagggacaggg

SEQ ID NO: 206 - DNA, 21 bp, Artificial Sequence
  Synthetic
gggtccgggtctgggtctggg

SEQ ID NO: 207 - DNA, 19 bp, Artificial Sequence
  Synthetic
gggctctgggtgggccggg

SEQ ID NO: 208 - DNA, 17 bp, Artificial Sequence
  Synthetic
gggtgggctgggaaggg

SEQ ID NO: 209 - DNA, 17 bp, Artificial Sequence
  Synthetic
gggagggagggctaggg

SEQ ID NO: 210 - DNA, 18 bp, Artificial Sequence
  Synthetic
gggctgggctgggcaggg

SEQ ID NO: 211 - DNA, 17 bp, Artificial Sequence
  Synthetic
gggcagggctgggaggg

SEQ ID NO: 212 - DNA, 16 bp, Artificial Sequence
  Synthetic
gggtgggagggctggg

SEQ ID NO: 213 - DNA, 19 bp, Artificial Sequence
  Synthetic
gggcagggtctgggctggg

SEQ ID NO: 214 - DNA, 12 bp, Artificial Sequence
  Synthetic
tggtggtggtgg

SEQ ID NO: 215 - DNA, 42 bp, Artificial Sequence
  Synthetic
ttgacgcggttctatctagttacgcgttaaaccaactagaaa

SEQ ID NO: 216 - DNA, 44 bp, Artificial Sequence
  Synthetic
cgcgagtctaggggataacgcgttaaacttcctagaaggcggtt

SEQ ID NO: 217 - DNA, 44 bp, Artificial Sequence
  Synthetic
cgcggatctagattgtaacgcgttaaaccatctagaaggcggtt

SEQ ID NO: 218 - DNA, 44 bp, Artificial Sequence
  Synthetic
cgcgtcgctaccgcccggcgcgttaaacacactagaaggcggtt

SEQ ID NO: 219 - DNA, 37 bp, Artificial Sequence
  Synthetic
cgcggttctatctagttacgcgttaaaccaactagaa

SEQ ID NO: 220 - DNA, 42 bp, Artificial Sequence
  Synthetic
ttgacgcgcttctatctagttacgcgttaaaccaactagaaa

SEQ ID NO: 221 - DNA, 42 bp, Artificial Sequence
  Synthetic
ttgacgcggttctatctacttacgcgttaaaccaactagaaa

SEQ ID NO: 222 - DNA, 81 bp, Artificial Sequence
  Synthetic
ggcggggctcgttggtctaggggtatgattctcgcttcgggtgcgagaggtcccgggttcaaatcccggacgagccccgcc

SEQ ID NO: 223 - DNA, 43 bp, Artificial Sequence
  Synthetic
gcgtaacctccatccgagttgcaagagagggaaacgcagtctc

SEQ ID NO: 224 - DNA, 160 bp, Artificial Sequence
  Synthetic
ggaattgcgggaaaggggtcaacagccgttcagtaccaagtctcaggggaaactttgagatggccttgcaaagggtatggtaataagctgacggacatggtcctaaccacgcagccaagtcctaagtcaacagatcttctgttgatatggatgcagttca

SEQ ID NO: 225 - DNA, 8 bp, Artificial Sequence
  Synthetic
tctctctc

SEQ ID NO: 226 - DNA, 18 bp, Artificial Sequence
  Synthetic
tctctctcacacacacac

SEQ ID NO: 227 - DNA, 8 bp, Artificial Sequence
  Synthetic
tcatctct

SEQ ID NO: 228 - DNA, 18 bp, Artificial Sequence
  Synthetic
tcatctctacacacacac

SEQ ID NO: 229 - DNA, 8 bp, Artificial Sequence
  Synthetic
caatcact

SEQ ID NO: 230 - DNA, 18 bp, Artificial Sequence
  Synthetic
caatcactacacacacac

SEQ ID NO: 231 - DNA, 8 bp, Artificial Sequence
  Synthetic
aactctct

SEQ ID NO: 232 - DNA, 18 bp, Artificial Sequence
  Synthetic
aactctctacacacacac

SEQ ID NO: 233 - DNA, 8 bp, Artificial Sequence
  Synthetic
aacaatct

SEQ ID NO: 234 - DNA, 18 bp, Artificial Sequence
  Synthetic
aacaatctacacacacac

SEQ ID NO: 235 - DNA, 8 bp, Artificial Sequence
  Synthetic
cctcttct

SEQ ID NO: 236 - DNA, 18 bp, Artificial Sequence
  Synthetic
cctcttctacacacacac

SEQ ID NO: 237 - DNA, 250 bp, Artificial Sequence
  Synthetic
gagggcctatttcccatgattccttcatatttgcatatacgatacaaggctgttagagagataattagaattaatttgactgtaaacacaaagatattagtacaaaatacgtgacgtagaaagtaataatttcttgggtagtttgcagttttaaaattatgttttaaaatggactatcatatgcttaccgtaacttgaaagtatttcgatttcttggctttatatatcttgtggaaaggacgaaacaccg

SEQ ID NO: 238 - DNA, 301 bp, Artificial Sequence
  Synthetic
gcctgaggcgtggggccgcctcccaaagacttctgggagggcggtgcggctcaggctctgccccgcctccggggctatttgcatacgaccatttccagtaattcccagcagccaccgtagctatatttggtagaacaacgagcactttctcaactccagtcaataactacgttagttgcattacacattgggctaatataaatagaggttaaatctctaggtcatttaagagaagtcggcctatgtgtacagacatttgttccaggggctttaaatagctggtggtggaactcaatattcg

SEQ ID NO: 239 - DNA, 301 bp, Artificial Sequence
  Synthetic
aagtccgcggcacgagaaatcaaagccccggggcctgggtcccacgcggggtcccttacccagggtgccccgggcgctcatttgcatgtcccacccaacaggtaaacctgacagatcggtcgcggccaggtacggcctggcggtcagagcaccaaacttacgagccttgtgatgagttccgttacatgaaattctcctaaaggctccaagatggacaggaaagcgctcgattaggttaccgtaaggaaaacaaatgagaaactcccgtgccttataagacctggggacggacttatttgcg

SEQ ID NO: 240 - DNA, 301 bp, Artificial Sequence
  Synthetic
aaattgagtcatctgacagaaattatctttggcaaggttttagtcctagggttaccagatggaatacaggacatccatttaaatttgaatttcagataaacagttaacacttctcaaggataaatatgcctcaaatattgcacgggacatatttatactaaaaaaaaagtgtttttttttttcctgcgattcaaacttaactggtgtcctgcatttgtatttgttaaatctgtcaatcctatctcagtttcctttgatggaatgtacctctgtgctaatatttaaaaataggttacatttg

SEQ ID NO: 241 - DNA, 905 bp, Artificial Sequence
  Synthetic
tagttattaatagtaatcaattacggggtcattagttcatagcccatatatggagttccgcgttacataacttacggtaaatggcccgcctggctgaccgcccaacgacccccgcccattgacgtcaataatgacgtatgttcccatagtaacgccaatagggactttccattgacgtcaatgggtggagtatttacggtaaactgcccacttggcagtacatcaagtgtatcatatgccaagtacgccccctattgacgtcaatgacggtaaatggcccgcctggcattatgcccagtacatgaccttatgggactttcctacttggcagtacatctacgtattagtcatcgctattaccatggtgatgcggttttggcagtacatcaatgggcgtggatagcggtttgactcacggggatttccaagtctccaccccattgacgtcaatgggagtttgttttggcaccaaaatcaacgggactttccaaaatgtcgtaacaactccgccccattgacgcaaatgggcggtaggcgtgtacggtgggaggtctatataagcagagctggtttagtgaaccgtcagatcgttcactgccgtataggcagggcccagactgagcacgtgagttttagagctagaaatagcaagttaaaataaggctagtccgttatcaacttgaaaaagtgggaccgagtcggtcctctgccatcaaagcgtgctcagtctgttttagggtcatgaaggtttttcttttcctgagaaaacaacacgtattgttttctcaggttttgctttttggcctttttctagcttaaaaaaaaaaaaagcaaaagatgctggtggttggcactcctggtttccaggacggggttcaaatccctgcggcgtctttgctttgact

SEQ ID NO: 242 - DNA, 942 bp, Artificial Sequence
  Synthetic
tagttattaatagtaatcaattacggggtcattagttcatagcccatatatggagttccgcgttacataacttacggtaaatggcccgcctggctgaccgcccaacgacccccgcccattgacgtcaataatgacgtatgttcccatagtaacgccaatagggactttccattgacgtcaatgggtggagtatttacggtaaactgcccacttggcagtacatcaagtgtatcatatgccaagtacgccccctattgacgtcaatgacggtaaatggcccgcctggcattatgcccagtacatgaccttatgggactttcctacttggcagtacatctacgtattagtcatcgctattaccatggtgatgcggttttggcagtacatcaatgggcgtggatagcggtttgactcacggggatttccaagtctccaccccattgacgtcaatgggagtttgttttggcaccaaaatcaacgggactttccaaaatgtcgtaacaactccgccccattgacgcaaatgggcggtaggcgtgtacggtgggaggtctatataagcagagctggtttagtgaaccgtcagatcgttcactgccgtataggcagggcccagactgagcacgtgagttttagagctagaaatagcaagttaaaataaggctagtccgttatcaacttgaaaaagtgggaccgagtcggtcctctgccatcaaagcgtgctcagtctgttttgttttggctgggtttttccttgttcgcaccggacacctccagtgaccagacggcaaggtttttatcccagtgtatattggaaaaacatgttatacttttgacaatttaacgtgcctagagctcaaattaaactaataccataacgtaatgcaacttacaacataaataaaggtcaatgtttaatccataaaaaaaaaaaaaaaaaaa

SEQ ID NO: 243 - DNA, 1370 bp, Artificial Sequence
  Synthetic
tagttattaatagtaatcaattacggggtcattagttcatagcccatatatggagttccgcgttacataacttacggtaaatggcccgcctggctgaccgcccaacgacccccgcccattgacgtcaataatgacgtatgttcccatagtaacgccaatagggactttccattgacgtcaatgggtggagtatttacggtaaactgcccacttggcagtacatcaagtgtatcatatgccaagtacgccccctattgacgtcaatgacggtaaatggcccgcctggcattatgcccagtacatgaccttatgggactttcctacttggcagtacatctacgtattagtcatcgctattaccatggtgatgcggttttggcagtacatcaatgggcgtggatagcggtttgactcacggggatttccaagtctccaccccattgacgtcaatgggagtttgttttggcaccaaaatcaacgggactttccaaaatgtcgtaacaactccgccccattgacgcaaatgggcggtaggcgtgtacggtgggaggtctatataagcagagctggtttagtgaaccgtcagatcgttcactgccgtataggcagggcccagactgagcacgtgagttttagagctagaaatagcaagttaaaataaggctagtccgttatcaacttgaaaaagtgggaccgagtcggtcctctgccatcaaagcgtgctcagtctgttttgttttggctgggtttttccttgttcgcaccggacacctccagtgaccagacggcaaggtttttatcccagtgtatattggaaaaacatgttatacttttgacaatttaacgtgcctagagctcaaattaaactaataccataacgtaatgcaacttacaacataaataaaggtcaatgtttaatccataaaaaaaaaaaaaaaaaaaacacactgttttggctgggtttttccttgttcgcaccggacacctccagtgaccagacggcaaggtttttatcccagtgtatattggaaaaacatgttatacttttgacaatttaacgtgcctagagctcaaattaaactaataccataacgtaatgcaacttacaacataaataaaggtcaatgtttaatccataaaaaaaaaaaaaaaaaaatctctctgttttggctgggtttttccttgttcgcaccggacacctccagtgaccagacggcaaggtttttatcccagtgtatattggaaaaacatgttatacttttgacaatttaacgtgcctagagctcaaattaaactaataccataacgtaatgcaacttacaacataaataaaggtcaatgtttaatccataaaaaaaaaaaaaaaaaaa

SEQ ID NO: 244 - DNA, 807 bp, Artificial Sequence
  Synthetic
tagttattaatagtaatcaattacggggtcattagttcatagcccatatatggagttccgcgttacataacttacggtaaatggcccgcctggctgaccgcccaacgacccccgcccattgacgtcaataatgacgtatgttcccatagtaacgccaatagggactttccattgacgtcaatgggtggagtatttacggtaaactgcccacttggcagtacatcaagtgtatcatatgccaagtacgccccctattgacgtcaatgacggtaaatggcccgcctggcattatgcccagtacatgaccttatgggactttcctacttggcagtacatctacgtattagtcatcgctattaccatggtgatgcggttttggcagtacatcaatgggcgtggatagcggtttgactcacggggatttccaagtctccaccccattgacgtcaatgggagtttgttttggcaccaaaatcaacgggactttccaaaatgtcgtaacaactccgccccattgacgcaaatgggcggtaggcgtgtacggtgggaggtctatataagcagagctggtttagtgaaccgtcagatcgttcactgccgtataggcagggcccagactgagcacgtgagttttagagctagaaatagcaagttaaaataaggctagtccgttatcaacttgaaaaagtgggaccgagtcggtcctctgccatcaaagcgtgctcagtctgtttgtttcaaaagtagactgtacgctaagggtcatatctttttttgtttggtttgtgtcttggttggcgtcttaaa

SEQ ID NO: 245 - DNA, 743 bp, Artificial Sequence
  Synthetic
ctaaggaccagcttctttgggagagaacagacgcaggggcgggagggaaaaagggagaggcagacgtcacttccccttggcggctctggcagcagattggtcggttgagtggcagaaaggcagacggggactgggcaaggcactgtcggtgacatcacggacagggcgacttctatgtagatgaggcagcgcagaggctgctgcttcgccacttgctgcttcaccacgaaggagttcccgtgccctgggagcgggttcaggaccgctgatcggaagtgagaatcccagctgtgtgtcagggctggaaagggctcgggagtgcgcggggcaagtgaccgtgtgtgtaaagagtgaggcgtatgaggctgtgtcggggcagaggcccaagatctcagttcactgccgtataggcagggcccagactgagcacgtgagttttagagctagaaatagcaagttaaaataaggctagtccgttatcaacttgaaaaagtgggaccgagtcggtcctctgccatcaaagcgtgctcagtctgtttcagcaagttcagagaaatctgaacttgctggatttttggagcagggagatggaataggagcttgctccgtccactccacgcatcgacctggtattgcagtacctccaggaacggtgcacccactttctggagtttcaaaagtagactgtacgctaagggtcatatctttttttgtttggtttgtgtcttggttggcgtcttaaa

SEQ ID NO: 246 - DNA, 10 bp, Artificial Sequence
  Synthetic
gttttaaaac

SEQ ID NO: 247 - DNA, 141 bp, Artificial Sequence
  Synthetic
ggcccagactgagcacgtgagttttagagctagctcatgaaaatgagctagcaagttaaaataaggctagtccgttatcaacttgaaaaagtgggaccgagtcggtcctctgccatcaaagcgtgctcagtctgttttttt

SEQ ID NO: 248 - DNA, 129 bp, Artificial Sequence
  Synthetic
ggcccagactgagcacgtgagtttgagagctagaaatagcaagtttaaataaggctagtccgttatcaacttgaaaaagtgggaccgagtcggtcctctgccatcaaagcgtgctcagtctgttttttt

SEQ ID NO: 249 - DNA, 34 bp, Artificial Sequence
  Synthetic
ggcccagactgagcacgtgagttttagagctaga

SEQ ID NO: 250 - DNA, 88 bp, Artificial Sequence
  Synthetic
aatagcaagttaaaataaggctagtccgttatcaacttgaaaaagtgggaccgagtcggtcctctgccatcaaagcgtgctcagtctg

SEQ ID NO: 251 - DNA, 197 bp, Artificial Sequence
  Synthetic
ggcccagactgagcacgtgagttttagagctagaaatagcaagttaaaataaggctagtccgttatcaacttgaaaaagtgggaccgagtcggtcctctgccatcaaagcgtgctcagtctgggccggcatggtcccagcctcctcgctggcgccggctgggcaacatgcttcggcatggcgaatgggacttttttt

SEQ ID NO: 252 - DNA, 171 bp, Artificial Sequence
  Synthetic
ggtgggagacgtcccaccggcccagactgagcacgtgagttttagagctagaaatagcaagttaaaataaggctagtccgttatcaacttgaaaaagtgggaccgagtcggtcctctgccatcaaagcttcgaccgtgctcagtctggtgggagacgtcccaccttttttt

SEQ ID NO: 253 - DNA, 180 bp, Artificial Sequence
  Synthetic
gagcagcatggcgtcgctgctcacggcccagactgagcacgtgagttttagagctagaaatagcaagttaaaataaggctagtccgttatcaacttgaaaaagtgggaccgagtcggtcctctgccatcaaagcttcgaccgtgctcagtctccatcagttgacaccctgaggttttttt

SEQ ID NO: 254 - DNA, 188 bp, Artificial Sequence
  Synthetic
gcagacctaagtggugacatatggtctgggcccagactgagcacgtgagttttagagctauacgtagcaagttaaaataaggctagtccgttatcaacttuacgaagtgggaccgagtcggtcctctgccatcaaagcttcgaccgtgctcagtctgcatgcgattagaaataatcgcatgttttttt

SEQ ID NO: 255 - DNA, 125 bp, Artificial Sequence
  Synthetic
tctgccatcaaagctgcgaccgtgctcagtctggtgggagacgtcccaccggccggcatggtcccagcctcctcgctggcgccggctgggcaacatgcttcggcatggcgaatgggacttttttt

SEQ ID NO: 256 - DNA, 190 bp, Artificial Sequence
  Synthetic
ggcccagactgagcacgtgagttttagagctagaaatagcaagttaaaataaggctagtccgttatcaacttgaaaaagtggcaccgagtcggtgcgccctctggaggaagcagggcttcccgtgctcagtctgtctctctcttgacgcggttctatctagttacgcgttaaaccaactagaaatttttt

SEQ ID NO: 257 - DNA, 201 bp, Artificial Sequence
  Synthetic
ggcccagactgagcacgtgagtttaagagctaagctggaaacagcatagcaagtttaaataaggctagtccgttatcaactcgagagagtggcaccgagtcggtgctgccctctggaggaagcagggcttcccgtgctcagtctgtctctctcttgacgcggttctatctagttacgcgttaaaccaactagaaatttttt

SEQ ID NO: 258 - DNA, 201 bp, Artificial Sequence
  Synthetic
ggcccagactgagcacgtgagtttaagagctaagctggaaacagcatagcaagtttaaataaggctagtccgttatcaactggaaacagtggcaccgagtcggtgctgccctctggaggaagcagggcttcccgtgctcagtctgtctctctcttgacgcggttctatctagttacgcgttaaaccaactagaaatttttt

SEQ ID NO: 259 - DNA, 201 bp, Artificial Sequence
  Synthetic
ggcccagactgagcacgtgagtttaagagctaagctggaaacagcatagcaagtttaaataaggctagtccgttatcagctggaaacagcggcaccgagtcggtgctgccctctggaggaagcagggcttcccgtgctcagtctgtctctctcttgacgcggttctatctagttacgcgttaaaccaactagaaatttttt

SEQ ID NO: 260 - DNA, 201 bp, Artificial Sequence
  Synthetic
ggcccagactgagcacgtgagtttaagagctaagctggaaacagcatagcaagtttaaataaggctagtccgttatcaactcgaaagagtggcaccgagtcggtgctgccctctggaggaagcagggcttcccgtgctcagtctgtctctctcttgacgcggttctatctagttacgcgttaaaccaactagaaatttttt

SEQ ID NO: 261 - DNA, 201 bp, Artificial Sequence
  Synthetic
ggcccagactgagcacgtgagtttaagagctaagctggaaacagcatagcaagtttaaataaggctagtccgttatcaacgtgaaaacgtgactccgagtcggagttgccctctggaggaagcagggcttcccgtgctcagtctgtctctctcttgacgcggttctatctagttacgcgttaaaccaactagaaatttttt

SEQ ID NO: 262 - DNA, 201 bp, Artificial Sequence
  Synthetic
ggcccagactgagcacgtgagtttaagagctaagctggaaacagcatagcaagtttaaataaggctagtccgttatcaactcgaaagagtgcaaccgagtcggttgtgccctctggaggaagcagggcttcccgtgctcagtctgtctctctcttgacgcggttctatctagttacgcgttaaaccaactagaaatttttt

SEQ ID NO: 263 - DNA, 201 bp, Artificial Sequence
  Synthetic
ggcccagactgagcacgtgagtttaagagctaagctggaaacagcatagcaagtttaaataaggctagtccgttatcaacttgaaaaagtggcaccgagtcggtgctgccctctggaggaagcagggcttcccgtgctcagtctgtctctctcttgacgcggttctatctagttacgcgttaaaccaactagaaatttttt

SEQ ID NO: 264 - DNA, 203 bp, Artificial Sequence
  Synthetic
gtcatcttagtcattacctggtttaagagctaagctggaaacagcatagcaagtttaaataaggctagtccgttatcaactcgagagagtggcaccgagtcggtgctatgggaactcagtttatatgagttagtaatgactaagatgtcatctctttgacgcggttctatctagttacgcgttaaaccaactagaaatttttt

SEQ ID NO: 265 - DNA, 203 bp, Artificial Sequence
  Synthetic
gtcatcttagtcattacctggtttaagagctaagctggaaacagcatagcaagtttaaataaggctagtccgttatcaactggaaacagtggcaccgagtcggtgctatgggaactcagtttatatgagttagtaatgactaagatgtcatctctttgacgcggttctatctagttacgcgttaaaccaactagaaatttttt

SEQ ID NO: 266 - DNA, 203 bp, Artificial Sequence
  Synthetic
gtcatcttagtcattacctggtttaagagctaagctggaaacagcatagcaagtttaaataaggctagtccgttatcagctggaaacagcggcaccgagtcggtgctatgggaactcagtttatatgagttagtaatgactaagatgtcatctctttgacgcggttctatctagttacgcgttaaaccaactagaaatttttt

SEQ ID NO: 267 - DNA, 203 bp, Artificial Sequence
  Synthetic
gtcatcttagtcattacctggtttaagagctaagctggaaacagcatagcaagtttaaataaggctagtccgttatcaactcgaaagagtggcaccgagtcggtgctatgggaactcagtttatatgagttagtaatgactaagatgtcatctctttgacgcggttctatctagttacgcgttaaaccaactagaaatttttt

SEQ ID NO: 268 - DNA, 203 bp, Artificial Sequence
  Synthetic
gtcatcttagtcattacctggtttaagagctaagctggaaacagcatagcaagtttaaataaggctagtccgttatcaacgtgaaaacgtgactccgagtcggagttatgggaactcagtttatatgagttagtaatgactaagatgtcatctctttgacgcggttctatctagttacgcgttaaaccaactagaaatttttt

SEQ ID NO: 269 - DNA, 203 bp, Artificial Sequence
  Synthetic
gtcatcttagtcattacctggtttaagagctaagctggaaacagcatagcaagtttaaataaggctagtccgttatcaactcgaaagagtgcaaccgagtcggttgtatgggaactcagtttatatgagttagtaatgactaagatgtcatctctttgacgcggttctatctagttacgcgttaaaccaactagaaatttttt

SEQ ID NO: 270 - DNA, 203 bp, Artificial Sequence
  Synthetic
gtcatcttagtcattacctggtttaagagctaagctggaaacagcatagcaagtttaaataaggctagtccgttatcaacttgaaaaagtggcaccgagtcggtgctatgggaactcagtttatatgagttagtaatgactaagatgtcatctctttgacgcggttctatctagttacgcgttaaaccaactagaaatttttt

SEQ ID NO: 271 - DNA, 192 bp, Artificial Sequence
  Synthetic
gcattttcaggaggaagcgagttttagagctagaaatagcaagttaaaataaggctagtccgttatcaacttgaaaaagtggcaccgagtcggtgctacgaaggaaatgactcaaatatgccttcctcctgaaaataactctctttgacgcggttctatctagttacgcgttaaaccaactagaaatttttt

SEQ ID NO: 272 - DNA, 203 bp, Artificial Sequence
  Synthetic
gcattttcaggaggaagcgagtttaagagctaagctggaaacagcatagcaagtttaaataaggctagtccgttatcaactcgagagagtggcaccgagtcggtgcttacgaaggaaatgactcaaatatgccttcctcctgaaaataactctctttgacgcggttctatctagttacgcgttaaaccaactagaaatttttt

SEQ ID NO: 273 - DNA, 203 bp, Artificial Sequence
  Synthetic
gcattttcaggaggaagcgagtttaagagctaagctggaaacagcatagcaagtttaaataaggctagtccgttatcaactggaaacagtggcaccgagtcggtgcttacgaaggaaatgactcaaatatgccttcctcctgaaaataactctctttgacgcggttctatctagttacgcgttaaaccaactagaaatttttt

SEQ ID NO: 274 - DNA, 203 bp, Artificial Sequence
  Synthetic
gcattttcaggaggaagcgagtttaagagctaagctggaaacagcatagcaagtttaaataaggctagtccgttatcagctggaaacagcggcaccgagtcggtgcttacgaaggaaatgactcaaatatgccttcctcctgaaaataactctctttgacgcggttctatctagttacgcgttaaaccaactagaaatttttt

SEQ ID NO: 275 - DNA, 203 bp, Artificial Sequence
  Synthetic
gcattttcaggaggaagcgagtttaagagctaagctggaaacagcatagcaagtttaaataaggctagtccgttatcaactcgaaagagtggcaccgagtcggtgcttacgaaggaaatgactcaaatatgccttcctcctgaaaataactctctttgacgcggttctatctagttacgcgttaaaccaactagaaatttttt

SEQ ID NO: 276 - DNA, 203 bp, Artificial Sequence
  Synthetic
gcattttcaggaggaagcgagtttaagagctaagctggaaacagcatagcaagtttaaataaggctagtccgttatcaacgtgaaaacgtgactccgagtcggagtttacgaaggaaatgactcaaatatgccttcctcctgaaaataactctctttgacgcggttctatctagttacgcgttaaaccaactagaaatttttt

SEQ ID NO: 277 - DNA, 203 bp, Artificial Sequence
  Synthetic
gcattttcaggaggaagcgagtttaagagctaagctggaaacagcatagcaagtttaaataaggctagtccgttatcaactcgaaagagtgcaaccgagtcggttgttacgaaggaaatgactcaaatatgccttcctcctgaaaataactctctttgacgcggttctatctagttacgcgttaaaccaactagaaatttttt

SEQ ID NO: 278 - DNA, 203 bp, Artificial Sequence
  Synthetic
gcattttcaggaggaagcgagtttaagagctaagctggaaacagcatagcaagtttaaataaggctagtccgttatcaacttgaaaaagtggcaccgagtcggtgcttacgaaggaaatgactcaaatatgccttcctcctgaaaataactctctttgacgcggttctatctagttacgcgttaaaccaactagaaatttttt

SEQ ID NO: 279 - DNA, 182 bp, Artificial Sequence
  Synthetic
gcattttcaggaggaagcgagttttagagctagaaatagcaagttaaaataaggctagtccgttatcaacttgaaaaagtggcaccgagtcggtgctgtctgaagcaatcgcttcctcctgaaaataactctctttgacgcggttctatctagttacgcgttaaaccaactagaaatttttt

SEQ ID NO: 280 - DNA, 193 bp, Artificial Sequence
  Synthetic
gcattttcaggaggaagcgagtttaagagctaagctggaaacagcatagcaagtttaaataaggctagtccgttatcaactcgagagagtggcaccgagtcggtgcttgtctgaagcaatcgcttcctcctgaaaataactctctttgacgcggttctatctagttacgcgttaaaccaactagaaatttttt

SEQ ID NO: 281 - DNA, 193 bp, Artificial Sequence
  Synthetic
gcattttcaggaggaagcgagtttaagagctaagctggaaacagcatagcaagtttaaataaggctagtccgttatcaactggaaacagtggcaccgagtcggtgcttgtctgaagcaatcgcttcctcctgaaaataactctctttgacgcggttctatctagttacgcgttaaaccaactagaaatttttt

SEQ ID NO: 282 - DNA, 193 bp, Artificial Sequence
  Synthetic
gcattttcaggaggaagcgagtttaagagctaagctggaaacagcatagcaagtttaaataaggctagtccgttatcagctggaaacagcggcaccgagtcggtgcttgtctgaagcaatcgcttcctcctgaaaataactctctttgacgcggttctatctagttacgcgttaaaccaactagaaatttttt

SEQ ID NO: 283 - DNA, 193 bp, Artificial Sequence
  Synthetic
gcattttcaggaggaagcgagtttaagagctaagctggaaacagcatagcaagtttaaataaggctagtccgttatcaactcgaaagagtggcaccgagtcggtgcttgtctgaagcaatcgcttcctcctgaaaataactctctttgacgcggttctatctagttacgcgttaaaccaactagaaatttttt

SEQ ID NO: 284 - DNA, 193 bp, Artificial Sequence
  Synthetic
gcattttcaggaggaagcgagtttaagagctaagctggaaacagcatagcaagtttaaataaggctagtccgttatcaacgtgaaaacgtgactccgagtcggagtttgtctgaagcaatcgcttcctcctgaaaataactctctttgacgcggttctatctagttacgcgttaaaccaactagaaatttttt

SEQ ID NO: 285 - DNA, 193 bp, Artificial Sequence
  Synthetic
gcattttcaggaggaagcgagtttaagagctaagctggaaacagcatagcaagtttaaataaggctagtccgttatcaactcgaaagagtgcaaccgagtcggttgttgtctgaagcaatcgcttcctcctgaaaataactctctttgacgcggttctatctagttacgcgttaaaccaactagaaatttttt

SEQ ID NO: 286 - DNA, 193 bp, Artificial Sequence
  Synthetic
gcattttcaggaggaagcgagtttaagagctaagctggaaacagcatagcaagtttaaataaggctagtccgttatcaacttgaaaaagtggcaccgagtcggtgcttgtctgaagcaatcgcttcctcctgaaaataactctctttgacgcggttctatctagttacgcgttaaaccaactagaaatttttt

SEQ ID NO: 287 - DNA, 187 bp, Artificial Sequence
  Synthetic
gattcctggtgccagaaacagttttagagctagaaatagcaagttaaaataaggctagtccgttatcaacttgaaaaagtggcaccgagtcggtgctgctaaggactagttctgcccttctggcaccaggacctcttctttgacgcggttctatctagttacgcgttaaaccaactagaaatttttt

SEQ ID NO: 288 - DNA, 198 bp, Artificial Sequence
  Synthetic
gattcctggtgccagaaacagtttaagagctaagctggaaacagcatagcaagtttaaataaggctagtccgttatcaactcgagagagtggcaccgagtcggtgcttgctaaggactagttctgcccttctggcaccaggacctcttctttgacgcggttctatctagttacgcgttaaaccaactagaaatttttt

SEQ ID NO: 289 - DNA, 198 bp, Artificial Sequence
  Synthetic
gattcctggtgccagaaacagtttaagagctaagctggaaacagcatagcaagtttaaataaggctagtccgttatcaactggaaacagtggcaccgagtcggtgcttgctaaggactagttctgcccttctggcaccaggacctcttctttgacgcggttctatctagttacgcgttaaaccaactagaaatttttt

SEQ ID NO: 290 - DNA, 198 bp, Artificial Sequence
  Synthetic
gattcctggtgccagaaacagtttaagagctaagctggaaacagcatagcaagtttaaataaggctagtccgttatcagctggaaacagcggcaccgagtcggtgcttgctaaggactagttctgcccttctggcaccaggacctcttctttgacgcggttctatctagttacgcgttaaaccaactagaaatttttt

SEQ ID NO: 291 - DNA, 198 bp, Artificial Sequence
  Synthetic
gattcctggtgccagaaacagtttaagagctaagctggaaacagcatagcaagtttaaataaggctagtccgttatcaactcgaaagagtggcaccgagtcggtgcttgctaaggactagttctgcccttctggcaccaggacctcttctttgacgcggttctatctagttacgcgttaaaccaactagaaatttttt

SEQ ID NO: 292 - DNA, 198 bp, Artificial Sequence
  Synthetic
gattcctggtgccagaaacagtttaagagctaagctggaaacagcatagcaagtttaaataaggctagtccgttatcaacgtgaaaacgtgactccgagtcggagtttgctaaggactagttctgcccttctggcaccaggacctcttctttgacgcggttctatctagttacgcgttaaaccaactagaaatttttt

SEQ ID NO: 293 - DNA, 198 bp, Artificial Sequence
  Synthetic
gattcctggtgccagaaacagtttaagagctaagctggaaacagcatagcaagtttaaataaggctagtccgttatcaactcgaaagagtgcaaccgagtcggttgttgctaaggactagttctgcccttctggcaccaggacctcttctttgacgcggttctatctagttacgcgttaaaccaactagaaatttttt

SEQ ID NO: 294 - DNA, 198 bp, Artificial Sequence
  Synthetic
gattcctggtgccagaaacagtttaagagctaagctggaaacagcatagcaagtttaaataaggctagtccgttatcaacttgaaaaagtggcaccgagtcggtgcttgctaaggactagttctgcccttctggcaccaggacctcttctttgacgcggttctatctagttacgcgttaaaccaactagaaatttttt

SEQ ID NO: 295 - DNA, 177 bp, Artificial Sequence
  Synthetic
gattcctggtgccagaaacagttttagagctagaaatagcaagttaaaataaggctagtccgttatcaacttgaaaaagtggcaccgagtcggtgcgtcaccactgtttctggcaccaggacctcttctttgacgcggttctatctagttacgcgttaaaccaactagaaatttttt

SEQ ID NO: 296 - DNA, 188 bp, Artificial Sequence
  Synthetic
gattcctggtgccagaaacagtttaagagctaagctggaaacagcatagcaagtttaaataaggctagtccgttatcaactcgagagagtggcaccgagtcggtgctgtcaccactgtttctggcaccaggacctcttctttgacgcggttctatctagttacgcgttaaaccaactagaaatttttt

SEQ ID NO: 297 - DNA, 188 bp, Artificial Sequence
  Synthetic
gattcctggtgccagaaacagtttaagagctaagctggaaacagcatagcaagtttaaataaggctagtccgttatcaactggaaacagtggcaccgagtcggtgctgtcaccactgtttctggcaccaggacctcttctttgacgcggttctatctagttacgcgttaaaccaactagaaatttttt

SEQ ID NO: 298 - DNA, 188 bp, Artificial Sequence
  Synthetic
gattcctggtgccagaaacagtttaagagctaagctggaaacagcatagcaagtttaaataaggctagtccgttatcagctggaaacagcggcaccgagtcggtgctgtcaccactgtttctggcaccaggacctcttctttgacgcggttctatctagttacgcgttaaaccaactagaaatttttt

SEQ ID NO: 299 - DNA, 188 bp, Artificial Sequence
  Synthetic
gattcctggtgccagaaacagtttaagagctaagctggaaacagcatagcaagtttaaataaggctagtccgttatcaactcgaaagagtggcaccgagtcggtgctgtcaccactgtttctggcaccaggacctcttctttgacgcggttctatctagttacgcgttaaaccaactagaaatttttt

SEQ ID NO: 300 - DNA, 188 bp, Artificial Sequence
  Synthetic
gattcctggtgccagaaacagtttaagagctaagctggaaacagcatagcaagtttaaataaggctagtccgttatcaacgtgaaaacgtgactccgagtcggagttgtcaccactgtttctggcaccaggacctcttctttgacgcggttctatctagttacgcgttaaaccaactagaaatttttt

SEQ ID NO: 301 - DNA, 188 bp, Artificial Sequence
  Synthetic
gattcctggtgccagaaacagtttaagagctaagctggaaacagcatagcaagtttaaataaggctagtccgttatcaactcgaaagagtgcaaccgagtcggttgtgtcaccactgtttctggcaccaggacctcttctttgacgcggttctatctagttacgcgttaaaccaactagaaatttttt

SEQ ID NO: 302 - DNA, 188 bp, Artificial Sequence
  Synthetic
gattcctggtgccagaaacagtttaagagctaagctggaaacagcatagcaagtttaaataaggctagtccgttatcaacttgaaaaagtggcaccgagtcggtgctgtcaccactgtttctggcaccaggacctcttctttgacgcggttctatctagttacgcgttaaaccaactagaaatttttt

SEQ ID NO: 303 - DNA, 192 bp, Artificial Sequence
  Synthetic
ggaatcccttctgcagcaccgttttagagctagaaatagcaagttaaaataaggctagtccgttatcaacttgaaaaagtggcaccgagtcggtgctagtgcttgagaccgccagaagctcgggctgcagaagggacaatcactttgacgcggttctatctagttacgcgttaaaccaactagaaatttttt

SEQ ID NO: 304 - DNA, 203 bp, Artificial Sequence
  Synthetic
ggaatcccttctgcagcaccgtttaagagctaagctggaaacagcatagcaagtttaaataaggctagtccgttatcaactcgagagagtggcaccgagtcggtgcttagtgcttgagaccgccagaagctcgggctgcagaagggacaatcactttgacgcggttctatctagttacgcgttaaaccaactagaaatttttt

SEQ ID NO: 305 - DNA, 203 bp, Artificial Sequence
  Synthetic
ggaatcccttctgcagcaccgtttaagagctaagctggaaacagcatagcaagtttaaataaggctagtccgttatcaactggaaacagtggcaccgagtcggtgcttagtgcttgagaccgccagaagctcgggctgcagaagggacaatcactttgacgcggttctatctagttacgcgttaaaccaactagaaatttttt

SEQ ID NO: 306 - DNA, 203 bp, Artificial Sequence
  Synthetic
ggaatcccttctgcagcaccgtttaagagctaagctggaaacagcatagcaagtttaaataaggctagtccgttatcagctggaaacagcggcaccgagtcggtgcttagtgcttgagaccgccagaagctcgggctgcagaagggacaatcactttgacgcggttctatctagttacgcgttaaaccaactagaaatttttt

SEQ ID NO: 307 - DNA, 203 bp, Artificial Sequence
  Synthetic
ggaatcccttctgcagcaccgtttaagagctaagctggaaacagcatagcaagtttaaataaggctagtccgttatcaactcgaaagagtggcaccgagtcggtgcttagtgcttgagaccgccagaagctcgggctgcagaagggacaatcactttgacgcggttctatctagttacgcgttaaaccaactagaaatttttt

SEQ ID NO: 308 - DNA, 203 bp, Artificial Sequence
  Synthetic
ggaatcccttctgcagcaccgtttaagagctaagctggaaacagcatagcaagtttaaataaggctagtccgttatcaacgtgaaaacgtgactccgagtcggagtttagtgcttgagaccgccagaagctcgggctgcagaagggacaatcactttgacgcggttctatctagttacgcgttaaaccaactagaaatttttt

SEQ ID NO: 309 - DNA, 203 bp, Artificial Sequence
  Synthetic
ggaatcccttctgcagcaccgtttaagagctaagctggaaacagcatagcaagtttaaataaggctagtccgttatcaactcgaaagagtgcaaccgagtcggttgttagtgcttgagaccgccagaagctcgggctgcagaagggacaatcactttgacgcggttctatctagttacgcgttaaaccaactagaaatttttt

SEQ ID NO: 310 - DNA, 203 bp, Artificial Sequence
  Synthetic
ggaatcccttctgcagcaccgtttaagagctaagctggaaacagcatagcaagtttaaataaggctagtccgttatcaacttgaaaaagtggcaccgagtcggtgcttagtgcttgagaccgccagaagctcgggctgcagaagggacaatcactttgacgcggttctatctagttacgcgttaaaccaactagaaatttttt

SEQ ID NO: 311 - DNA, 193 bp, Artificial Sequence
  Synthetic
ggaatcccttctgcagcaccgtttaagagctaagctggaaacagcatagcaagtttaaataaggctagtccgttatcaactcgagagagtggcaccgagtcggtgctggaaaagcgatcaaggtgctgcagaagggacaatcactttgacgcggttctatctagttacgcgttaaaccaactagaaatttttt

SEQ ID NO: 312 - DNA, 193 bp, Artificial Sequence
  Synthetic
ggaatcccttctgcagcaccgtttaagagctaagctggaaacagcatagcaagtttaaataaggctagtccgttatcaactggaaacagtggcaccgagtcggtgctggaaaagcgatcaaggtgctgcagaagggacaatcactttgacgcggttctatctagttacgcgttaaaccaactagaaatttttt

SEQ ID NO: 313 - DNA, 193 bp, Artificial Sequence
  Synthetic
ggaatcccttctgcagcaccgtttaagagctaagctggaaacagcatagcaagtttaaataaggctagtccgttatcagctggaaacagcggcaccgagtcggtgctggaaaagcgatcaaggtgctgcagaagggacaatcactttgacgcggttctatctagttacgcgttaaaccaactagaaatttttt

SEQ ID NO: 314 - DNA, 193 bp, Artificial Sequence
  Synthetic
ggaatcccttctgcagcaccgtttaagagctaagctggaaacagcatagcaagtttaaataaggctagtccgttatcaactcgaaagagtggcaccgagtcggtgctggaaaagcgatcaaggtgctgcagaagggacaatcactttgacgcggttctatctagttacgcgttaaaccaactagaaatttttt

SEQ ID NO: 315 - DNA, 193 bp, Artificial Sequence
  Synthetic
ggaatcccttctgcagcaccgtttaagagctaagctggaaacagcatagcaagtttaaataaggctagtccgttatcaacgtgaaaacgtgactccgagtcggagttggaaaagcgatcaaggtgctgcagaagggacaatcactttgacgcggttctatctagttacgcgttaaaccaactagaaatttttt

SEQ ID NO: 316 - DNA, 193 bp, Artificial Sequence
  Synthetic
ggaatcccttctgcagcaccgtttaagagctaagctggaaacagcatagcaagtttaaataaggctagtccgttatcaactcgaaagagtgcaaccgagtcggttgtggaaaagcgatcaaggtgctgcagaagggacaatcactttgacgcggttctatctagttacgcgttaaaccaactagaaatttttt

SEQ ID NO: 317 - DNA, 193 bp, Artificial Sequence
  Synthetic
ggaatcccttctgcagcaccgtttaagagctaagctggaaacagcatagcaagtttaaataaggctagtccgttatcaacttgaaaaagtggcaccgagtcggtgctggaaaagcgatcaaggtgctgcagaagggacaatcactttgacgcggttctatctagttacgcgttaaaccaactagaaatttttt

SEQ ID NO: 318 - DNA, 192 bp, Artificial Sequence
  Synthetic
gagtccgagcagaagaagaagttttagagctagaaatagcaagttaaaataaggctagtccgttatcaacttgaaaaagtggcaccgagtcggtgctcgtggcaatgcgccaccggttgatgttcttctgctcggaaacaatctttgacgcggttctatctagttacgcgttaaaccaactagaaatttttt

SEQ ID NO: 319 - DNA, 203 bp, Artificial Sequence
  Synthetic
gagtccgagcagaagaagaagtttaagagctaagctggaaacagcatagcaagtttaaataaggctagtccgttatcaactcgagagagtggcaccgagtcggtgcttcgtggcaatgcgccaccggttgatgttcttctgctcggaaacaatctttgacgcggttctatctagttacgcgttaaaccaactagaaatttttt

SEQ ID NO: 320 - DNA, 203 bp, Artificial Sequence
  Synthetic
gagtccgagcagaagaagaagtttaagagctaagctggaaacagcatagcaagtttaaataaggctagtccgttatcaactggaaacagtggcaccgagtcggtgcttcgtggcaatgcgccaccggttgatgttcttctgctcggaaacaatctttgacgcggttctatctagttacgcgttaaaccaactagaaatttttt

SEQ ID NO: 321 - DNA, 203 bp, Artificial Sequence
  Synthetic
gagtccgagcagaagaagaagtttaagagctaagctggaaacagcatagcaagtttaaataaggctagtccgttatcagctggaaacagcggcaccgagtcggtgcttcgtggcaatgcgccaccggttgatgttcttctgctcggaaacaatctttgacgcggttctatctagttacgcgttaaaccaactagaaatttttt

SEQ ID NO: 322 - DNA, 203 bp, Artificial Sequence
  Synthetic
gagtccgagcagaagaagaagtttaagagctaagctggaaacagcatagcaagtttaaataaggctagtccgttatcaactcgaaagagtggcaccgagtcggtgcttcgtggcaatgcgccaccggttgatgttcttctgctcggaaacaatctttgacgcggttctatctagttacgcgttaaaccaactagaaatttttt

SEQ ID NO: 323 - DNA, 203 bp, Artificial Sequence
  Synthetic
gagtccgagcagaagaagaagtttaagagctaagctggaaacagcatagcaagtttaaataaggctagtccgttatcaacgtgaaaacgtgactccgagtcggagtttcgtggcaatgcgccaccggttgatgttcttctgctcggaaacaatctttgacgcggttctatctagttacgcgttaaaccaactagaaatttttt

SEQ ID NO: 324 - DNA, 203 bp, Artificial Sequence
  Synthetic
gagtccgagcagaagaagaagtttaagagctaagctggaaacagcatagcaagtttaaataaggctagtccgttatcaactcgaaagagtgcaaccgagtcggttgttcgtggcaatgcgccaccggttgatgttcttctgctcggaaacaatctttgacgcggttctatctagttacgcgttaaaccaactagaaatttttt

SEQ ID NO: 325 - DNA, 203 bp, Artificial Sequence
  Synthetic
gagtccgagcagaagaagaagtttaagagctaagctggaaacagcatagcaagtttaaataaggctagtccgttatcaacttgaaaaagtggcaccgagtcggtgcttcgtggcaatgcgccaccggttgatgttcttctgctcggaaacaatctttgacgcggttctatctagttacgcgttaaaccaactagaaatttttt

SEQ ID NO: 326 - DNA, 182 bp, Artificial Sequence
  Synthetic
gagtccgagcagaagaagaagttttagagctagaaatagcaagttaaaataaggctagtccgttatcaacttgaaaaagtggcaccgagtcggtgcgtgatgggagcacttcttcttctgctcggaaacaatctttgacgcggttctatctagttacgcgttaaaccaactagaaatttttt

SEQ ID NO: 327 - DNA, 193 bp, Artificial Sequence
  Synthetic
gagtccgagcagaagaagaagtttaagagctaagctggaaacagcatagcaagtttaaataaggctagtccgttatcaactcgagagagtggcaccgagtcggtgctgtgatgggagcacttcttcttctgctcggaaacaatctttgacgcggttctatctagttacgcgttaaaccaactagaaatttttt

SEQ ID NO: 328 - DNA, 193 bp, Artificial Sequence
  Synthetic
gagtccgagcagaagaagaagtttaagagctaagctggaaacagcatagcaagtttaaataaggctagtccgttatcaactggaaacagtggcaccgagtcggtgctgtgatgggagcacttcttcttctgctcggaaacaatctttgacgcggttctatctagttacgcgttaaaccaactagaaatttttt

SEQ ID NO: 329 - DNA, 193 bp, Artificial Sequence
  Synthetic
gagtccgagcagaagaagaagtttaagagctaagctggaaacagcatagcaagtttaaataaggctagtccgttatcagctggaaacagcggcaccgagtcggtgctgtgatgggagcacttcttcttctgctcggaaacaatctttgacgcggttctatctagttacgcgttaaaccaactagaaatttttt

SEQ ID NO: 330 - DNA, 193 bp, Artificial Sequence
  Synthetic
gagtccgagcagaagaagaagtttaagagctaagctggaaacagcatagcaagtttaaataaggctagtccgttatcaactcgaaagagtggcaccgagtcggtgctgtgatgggagcacttcttcttctgctcggaaacaatctttgacgcggttctatctagttacgcgttaaaccaactagaaatttttt

SEQ ID NO: 331 - DNA, 193 bp, Artificial Sequence
  Synthetic
gagtccgagcagaagaagaagtttaagagctaagctggaaacagcatagcaagtttaaataaggctagtccgttatcaacgtgaaaacgtgactccgagtcggagttgtgatgggagcacttcttcttctgctcggaaacaatctttgacgcggttctatctagttacgcgttaaaccaactagaaatttttt

SEQ ID NO: 332 - DNA, 193 bp, Artificial Sequence
  Synthetic
gagtccgagcagaagaagaagtttaagagctaagctggaaacagcatagcaagtttaaataaggctagtccgttatcaactcgaaagagtgcaaccgagtcggttgtgtgatgggagcacttcttcttctgctcggaaacaatctttgacgcggttctatctagttacgcgttaaaccaactagaaatttttt

SEQ ID NO: 333 - DNA, 193 bp, Artificial Sequence
  Synthetic
gagtccgagcagaagaagaagtttaagagctaagctggaaacagcatagcaagtttaaataaggctagtccgttatcaacttgaaaaagtggcaccgagtcggtgctgtgatgggagcacttcttcttctgctcggaaacaatctttgacgcggttctatctagttacgcgttaaaccaactagaaatttttt

SEQ ID NO: 334 - DNA, 213 bp, Artificial Sequence
  Synthetic
gtcatcttagtcattacctggttttagagctagaaatagcaagttaaaataaggctagtccgttatcaacttgaaaaagtggcaccgagtcggtgctgagttacaacgaacacctcagcttatcgtcgtcatccttgtaatcgtaatgactaagatgtcatctctttgacgcggttctatctagttacgcgttaaaccaactagaaatttttt

SEQ ID NO: 335 - DNA, 224 bp, Artificial Sequence
  Synthetic
gtcatcttagtcattacctggtttaagagctaagctggaaacagcatagcaagtttaaataaggctagtccgttatcaactcgagagagtggcaccgagtcggtgcttgagttacaacgaacacctcagcttatcgtcgtcatccttgtaatcgtaatgactaagatgtcatctctttgacgcggttctatctagttacgcgttaaaccaactagaaatttttt

SEQ ID NO: 336 - DNA, 224 bp, Artificial Sequence
  Synthetic
gtcatcttagtcattacctggtttaagagctaagctggaaacagcatagcaagtttaaataaggctagtccgttatcaactggaaacagtggcaccgagtcggtgcttgagttacaacgaacacctcagcttatcgtcgtcatccttgtaatcgtaatgactaagatgtcatctctttgacgcggttctatctagttacgcgttaaaccaactagaaatttttt

SEQ ID NO: 337 - DNA, 224 bp, Artificial Sequence
  Synthetic
gtcatcttagtcattacctggtttaagagctaagctggaaacagcatagcaagtttaaataaggctagtccgttatcagctggaaacagcggcaccgagtcggtgcttgagttacaacgaacacctcagcttatcgtcgtcatccttgtaatcgtaatgactaagatgtcatctctttgacgcggttctatctagttacgcgttaaaccaactagaaatttttt

SEQ ID NO: 338 - DNA, 224 bp, Artificial Sequence
  Synthetic
gtcatcttagtcattacctggtttaagagctaagctggaaacagcatagcaagtttaaataaggctagtccgttatcaactcgaaagagtggcaccgagtcggtgcttgagttacaacgaacacctcagcttatcgtcgtcatccttgtaatcgtaatgactaagatgtcatctctttgacgcggttctatctagttacgcgttaaaccaactagaaatttttt

SEQ ID NO: 339 - DNA, 224 bp, Artificial Sequence
  Synthetic
gtcatcttagtcattacctggtttaagagctaagctggaaacagcatagcaagtttaaataaggctagtccgttatcaacgtgaaaacgtgactccgagtcggagtttgagttacaacgaacacctcagcttatcgtcgtcatccttgtaatcgtaatgactaagatgtcatctctttgacgcggttctatctagttacgcgttaaaccaactagaaatttttt

SEQ ID NO: 340 - DNA, 224 bp, Artificial Sequence
  Synthetic
gtcatcttagtcattacctggtttaagagctaagctggaaacagcatagcaagtttaaataaggctagtccgttatcaactcgaaagagtgcaaccgagtcggttgttgagttacaacgaacacctcagcttatcgtcgtcatccttgtaatcgtaatgactaagatgtcatctctttgacgcggttctatctagttacgcgttaaaccaactagaaatttttt

SEQ ID NO: 341 - DNA, 224 bp, Artificial Sequence
  Synthetic
gtcatcttagtcattacctggtttaagagctaagctggaaacagcatagcaagtttaaataaggctagtccgttatcaacttgaaaaagtggcaccgagtcggtgcttgagttacaacgaacacctcagcttatcgtcgtcatccttgtaatcgtaatgactaagatgtcatctctttgacgcggttctatctagttacgcgttaaaccaactagaaatttttt

SEQ ID NO: 342 - DNA, 198 bp, Artificial Sequence
  Synthetic
gatgtctgcaggccagatgagtttaagagctaagctggaaacagcatagcaagtttaaataaggctagtccgttatcaactcgagagagtggcaccgagtcggtgctaatgtgccatctggagcactcatctggcctgcagaacaatctcttgacgcggttctatctagttacgcgttaaaccaactagaaatttttt

SEQ ID NO: 343 - DNA, 198 bp, Artificial Sequence
  Synthetic
gatgtctgcaggccagatgagtttaagagctaagctggaaacagcatagcaagtttaaataaggctagtccgttatcaactggaaacagtggcaccgagtcggtgctaatgtgccatctggagcactcatctggcctgcagaacaatctcttgacgcggttctatctagttacgcgttaaaccaactagaaatttttt

SEQ ID NO: 344 - DNA, 198 bp, Artificial Sequence
  Synthetic
gatgtctgcaggccagatgagtttaagagctaagctggaaacagcatagcaagtttaaataaggctagtccgttatcagctggaaacagcggcaccgagtcggtgctaatgtgccatctggagcactcatctggcctgcagaacaatctcttgacgcggttctatctagttacgcgttaaaccaactagaaatttttt

SEQ ID NO: 345 - DNA, 198 bp, Artificial Sequence
  Synthetic
gatgtctgcaggccagatgagtttaagagctaagctggaaacagcatagcaagtttaaataaggctagtccgttatcaactcgaaagagtggcaccgagtcggtgctaatgtgccatctggagcactcatctggcctgcagaacaatctcttgacgcggttctatctagttacgcgttaaaccaactagaaatttttt

SEQ ID NO: 346 - DNA, 198 bp, Artificial Sequence
  Synthetic
gatgtctgcaggccagatgagtttaagagctaagctggaaacagcatagcaagtttaaataaggctagtccgttatcaacgtgaaaacgtgactccgagtcggagttaatgtgccatctggagcactcatctggcctgcagaacaatctcttgacgcggttctatctagttacgcgttaaaccaactagaaatttttt

SEQ ID NO: 347 - DNA, 198 bp, Artificial Sequence
  Synthetic
gatgtctgcaggccagatgagtttaagagctaagctggaaacagcatagcaagtttaaataaggctagtccgttatcaactcgaaagagtgcaaccgagtcggttgtaatgtgccatctggagcactcatctggcctgcagaacaatctcttgacgcggttctatctagttacgcgttaaaccaactagaaatttttt

SEQ ID NO: 348 - DNA, 198 bp, Artificial Sequence
  Synthetic
gatgtctgcaggccagatgagtttaagagctaagctggaaacagcatagcaagtttaaataaggctagtccgttatcaacttgaaaaagtggcaccgagtcggtgctaatgtgccatctggagcactcatctggcctgcagaacaatctcttgacgcggttctatctagttacgcgttaaaccaactagaaatttttt

SEQ ID NO: 349 - DNA, 211 bp, Artificial Sequence
  Synthetic
gatgtctgcaggccagatgagttttagagctagaaatagcaagttaaaataaggctagtccgttatcaacttgaaaaagtggcaccgagtcggtgcaatgtgccatctggagcactcacttatcgtcgtcatccttgtaatctctggcctgcagaacaatctcttgacgcggttctatctagttacgcgttaaaccaactagaaatttttt

SEQ ID NO: 350 - DNA, 222 bp, Artificial Sequence
  Synthetic
gatgtctgcaggccagatgagtttaagagctaagctggaaacagcatagcaagtttaaataaggctagtccgttatcaactcgagagagtggcaccgagtcggtgctaatgtgccatctggagcactcacttatcgtcgtcatccttgtaatctctggcctgcagaacaatctcttgacgcggttctatctagttacgcgttaaaccaactagaaatttttt

SEQ ID NO: 351 - DNA, 222 bp, Artificial Sequence
  Synthetic
gatgtctgcaggccagatgagtttaagagctaagctggaaacagcatagcaagtttaaataaggctagtccgttatcaactggaaacagtggcaccgagtcggtgctaatgtgccatctggagcactcacttatcgtcgtcatccttgtaatctctggcctgcagaacaatctcttgacgcggttctatctagttacgcgttaaaccaactagaaatttttt

SEQ ID NO: 352 - DNA, 222 bp, Artificial Sequence
  Synthetic
gatgtctgcaggccagatgagtttaagagctaagctggaaacagcatagcaagtttaaataaggctagtccgttatcagctggaaacagcggcaccgagtcggtgctaatgtgccatctggagcactcacttatcgtcgtcatccttgtaatctctggcctgcagaacaatctcttgacgcggttctatctagttacgcgttaaaccaactagaaatttttt

SEQ ID NO: 353 - DNA, 222 bp, Artificial Sequence
  Synthetic
gatgtctgcaggccagatgagtttaagagctaagctggaaacagcatagcaagtttaaataaggctagtccgttatcaactcgaaagagtggcaccgagtcggtgctaatgtgccatctggagcactcacttatcgtcgtcatccttgtaatctctggcctgcagaacaatctcttgacgcggttctatctagttacgcgttaaaccaactagaaatttttt

SEQ ID NO: 354 - DNA, 222 bp, Artificial Sequence
  Synthetic
gatgtctgcaggccagatgagtttaagagctaagctggaaacagcatagcaagtttaaataaggctagtccgttatcaacgtgaaaacgtgactccgagtcggagttaatgtgccatctggagcactcacttatcgtcgtcatccttgtaatctctggcctgcagaacaatctcttgacgcggttctatctagttacgcgttaaaccaactagaaatttttt

SEQ ID NO: 355 - DNA, 222 bp, Artificial Sequence
  Synthetic
gatgtctgcaggccagatgagtttaagagctaagctggaaacagcatagcaagtttaaataaggctagtccgttatcaactcgaaagagtgcaaccgagtcggttgtaatgtgccatctggagcactcacttatcgtcgtcatccttgtaatctctggcctgcagaacaatctcttgacgcggttctatctagttacgcgttaaaccaactagaaatttttt

SEQ ID NO: 356 - DNA, 222 bp, Artificial Sequence
  Synthetic
gatgtctgcaggccagatgagtttaagagctaagctggaaacagcatagcaagtttaaataaggctagtccgttatcaacttgaaaaagtggcaccgagtcggtgctaatgtgccatctggagcactcacttatcgtcgtcatccttgtaatctctggcctgcagaacaatctcttgacgcggttctatctagttacgcgttaaaccaactagaaatttttt

SEQ ID NO: 357 - DNA, 187 bp, Artificial Sequence
  Synthetic
gatgtctgcaggccagatgagttttagagctagaaatagcaagttaaaataaggctagtccgttatcaacttgaaaaagtggcaccgagtcggtgcgtgtgtccctctgacaatgtgctctggcctgcagaacaatctcttgacgcggttctatctagttacgcgttaaaccaactagaaatttttt

SEQ ID NO: 358 - DNA, 198 bp, Artificial Sequence
  Synthetic
gatgtctgcaggccagatgagtttaagagctaagctggaaacagcatagcaagtttaaataaggctagtccgttatcaactcgagagagtggcaccgagtcggtgctgtgtgtccctctgacaatgtgctctggcctgcagaacaatctcttgacgcggttctatctagttacgcgttaaaccaactagaaatttttt

SEQ ID NO: 359 - DNA, 198 bp, Artificial Sequence
  Synthetic
gatgtctgcaggccagatgagtttaagagctaagctggaaacagcatagcaagtttaaataaggctagtccgttatcaactggaaacagtggcaccgagtcggtgctgtgtgtccctctgacaatgtgctctggcctgcagaacaatctcttgacgcggttctatctagttacgcgttaaaccaactagaaatttttt

SEQ ID NO: 360 - DNA, 198 bp, Artificial Sequence
  Synthetic
gatgtctgcaggccagatgagtttaagagctaagctggaaacagcatagcaagtttaaataaggctagtccgttatcagctggaaacagcggcaccgagtcggtgctgtgtgtccctctgacaatgtgctctggcctgcagaacaatctcttgacgcggttctatctagttacgcgttaaaccaactagaaatttttt

SEQ ID NO: 361 - DNA, 198 bp, Artificial Sequence
  Synthetic
gatgtctgcaggccagatgagtttaagagctaagctggaaacagcatagcaagtttaaataaggctagtccgttatcaactcgaaagagtggcaccgagtcggtgctgtgtgtccctctgacaatgtgctctggcctgcagaacaatctcttgacgcggttctatctagttacgcgttaaaccaactagaaatttttt

SEQ ID NO: 362 - DNA, 198 bp, Artificial Sequence
  Synthetic
gatgtctgcaggccagatgagtttaagagctaagctggaaacagcatagcaagtttaaataaggctagtccgttatcaacgtgaaaacgtgactccgagtcggagttgtgtgtccctctgacaatgtgctctggcctgcagaacaatctcttgacgcggttctatctagttacgcgttaaaccaactagaaatttttt

SEQ ID NO: 363 - DNA, 198 bp, Artificial Sequence
  Synthetic
gatgtctgcaggccagatgagtttaagagctaagctggaaacagcatagcaagtttaaataaggctagtccgttatcaactcgaaagagtgcaaccgagtcggttgtgtgtgtccctctgacaatgtgctctggcctgcagaacaatctcttgacgcggttctatctagttacgcgttaaaccaactagaaatttttt

SEQ ID NO: 364 - DNA, 198 bp, Artificial Sequence
  Synthetic
gatgtctgcaggccagatgagtttaagagctaagctggaaacagcatagcaagtttaaataaggctagtccgttatcaacttgaaaaagtggcaccgagtcggtgctgtgtgtccctctgacaatgtgctctggcctgcagaacaatctcttgacgcggttctatctagttacgcgttaaaccaactagaaatttttt

SEQ ID NO: 365 - DNA, 206 bp, Artificial Sequence
  Synthetic
gcattttcaggaggaagcgagttttagagctagaaatagcaagttaaaataaggctagtccgttatcaacttgaaaaagtggcaccgagtcggtgctgtctgaagccatcccttatcgtcgtcatccttgtaatccttcctcctgaaaataactctctttgacgcggttctatctagttacgcgttaaaccaactagaaatttttt

SEQ ID NO: 366 - DNA, 217 bp, Artificial Sequence
  Synthetic
gcattttcaggaggaagcgagtttaagagctaagctggaaacagcatagcaagtttaaataaggctagtccgttatcaactcgagagagtggcaccgagtcggtgcttgtctgaagccatcccttatcgtcgtcatccttgtaatccttcctcctgaaaataactctctttgacgcggttctatctagttacgcgttaaaccaactagaaatttttt

SEQ ID NO: 367 - DNA, 217 bp, Artificial Sequence
  Synthetic
gcattttcaggaggaagcgagtttaagagctaagctggaaacagcatagcaagtttaaataaggctagtccgttatcaactggaaacagtggcaccgagtcggtgcttgtctgaagccatcccttatcgtcgtcatccttgtaatccttcctcctgaaaataactctctttgacgcggttctatctagttacgcgttaaaccaactagaaatttttt

SEQ ID NO: 368 - DNA, 217 bp, Artificial Sequence
  Synthetic
gcattttcaggaggaagcgagtttaagagctaagctggaaacagcatagcaagtttaaataaggctagtccgttatcagctggaaacagcggcaccgagtcggtgcttgtctgaagccatcccttatcgtcgtcatccttgtaatccttcctcctgaaaataactctctttgacgcggttctatctagttacgcgttaaaccaactagaaatttttt

SEQ ID NO: 369 - DNA, 217 bp, Artificial Sequence
  Synthetic
gcattttcaggaggaagcgagtttaagagctaagctggaaacagcatagcaagtttaaataaggctagtccgttatcaactcgaaagagtggcaccgagtcggtgcttgtctgaagccatcccttatcgtcgtcatccttgtaatccttcctcctgaaaataactctctttgacgcggttctatctagttacgcgttaaaccaactagaaatttttt

SEQ ID NO: 370 - DNA, 217 bp, Artificial Sequence
  Synthetic
gcattttcaggaggaagcgagtttaagagctaagctggaaacagcatagcaagtttaaataaggctagtccgttatcaacgtgaaaacgtgactccgagtcggagtttgtctgaagccatcccttatcgtcgtcatccttgtaatccttcctcctgaaaataactctctttgacgcggttctatctagttacgcgttaaaccaactagaaatttttt

SEQ ID NO: 371 - DNA, 217 bp, Artificial Sequence
  Synthetic
gcattttcaggaggaagcgagtttaagagctaagctggaaacagcatagcaagtttaaataaggctagtccgttatcaactcgaaagagtgcaaccgagtcggttgttgtctgaagccatcccttatcgtcgtcatccttgtaatccttcctcctgaaaataactctctttgacgcggttctatctagttacgcgttaaaccaactagaaatttttt

SEQ ID NO: 372 - DNA, 217 bp, Artificial Sequence
  Synthetic
gcattttcaggaggaagcgagtttaagagctaagctggaaacagcatagcaagtttaaataaggctagtccgttatcaacttgaaaaagtggcaccgagtcggtgcttgtctgaagccatcccttatcgtcgtcatccttgtaatccttcctcctgaaaataactctctttgacgcggttctatctagttacgcgttaaaccaactagaaatttttt

SEQ ID NO: 373 - DNA, 212 bp, Artificial Sequence
  Synthetic
gattcctggtgccagaaacagttttagagctagaaatagcaagttaaaataaggctagtccgttatcaacttgaaaaagtggcaccgagtcggtgctctgccctcccgtcacccctgtcttatcgtcgtcatccttgtaatcttctggcaccaggacctcttctttgacgcggttctatctagttacgcgttaaaccaactagaaatttttt

SEQ ID NO: 374 - DNA, 223 bp, Artificial Sequence
  Synthetic
gattcctggtgccagaaacagtttaagagctaagctggaaacagcatagcaagtttaaataaggctagtccgttatcaactcgagagagtggcaccgagtcggtgcttctgccctcccgtcacccctgtcttatcgtcgtcatccttgtaatcttctggcaccaggacctcttctttgacgcggttctatctagttacgcgttaaaccaactagaaatttttt

SEQ ID NO: 375 - DNA, 223 bp, Artificial Sequence
  Synthetic
gattcctggtgccagaaacagtttaagagctaagctggaaacagcatagcaagtttaaataaggctagtccgttatcaactggaaacagtggcaccgagtcggtgcttctgccctcccgtcacccctgtcttatcgtcgtcatccttgtaatcttctggcaccaggacctcttctttgacgcggttctatctagttacgcgttaaaccaactagaaatttttt

SEQ ID NO: 376 - DNA, 223 bp, Artificial Sequence
  Synthetic
gattcctggtgccagaaacagtttaagagctaagctggaaacagcatagcaagtttaaataaggctagtccgttatcagctggaaacagcggcaccgagtcggtgcttctgccctcccgtcacccctgtcttatcgtcgtcatccttgtaatcttctggcaccaggacctcttctttgacgcggttctatctagttacgcgttaaaccaactagaaatttttt

SEQ ID NO: 377 - DNA, 223 bp, Artificial Sequence
  Synthetic
gattcctggtgccagaaacagtttaagagctaagctggaaacagcatagcaagtttaaataaggctagtccgttatcaactcgaaagagtggcaccgagtcggtgcttctgccctcccgtcacccctgtcttatcgtcgtcatccttgtaatcttctggcaccaggacctcttctttgacgcggttctatctagttacgcgttaaaccaactagaaatttttt

SEQ ID NO: 378 - DNA, 223 bp, Artificial Sequence
  Synthetic
gattcctggtgccagaaacagtttaagagctaagctggaaacagcatagcaagtttaaataaggctagtccgttatcaacgtgaaaacgtgactccgagtcggagtttctgccctcccgtcacccctgtcttatcgtcgtcatccttgtaatcttctggcaccaggacctcttctttgacgcggttctatctagttacgcgttaaaccaactagaaatttttt

SEQ ID NO: 379 - DNA, 223 bp, Artificial Sequence
  Synthetic
gattcctggtgccagaaacagtttaagagctaagctggaaacagcatagcaagtttaaataaggctagtccgttatcaactcgaaagagtgcaaccgagtcggttgttctgccctcccgtcacccctgtcttatcgtcgtcatccttgtaatcttctggcaccaggacctcttctttgacgcggttctatctagttacgcgttaaaccaactagaaatttttt

SEQ ID NO: 380 - DNA, 223 bp, Artificial Sequence
  Synthetic
gattcctggtgccagaaacagtttaagagctaagctggaaacagcatagcaagtttaaataaggctagtccgttatcaacttgaaaaagtggcaccgagtcggtgcttctgccctcccgtcacccctgtcttatcgtcgtcatccttgtaatcttctggcaccaggacctcttctttgacgcggttctatctagttacgcgttaaaccaactagaaatttttt

SEQ ID NO: 381 - protein, 1517 aa, Artificial Sequence
  Synthetic
MKRTADGSEFESPKKKRKVDKKYSIGLDIGTNSVGWAVITDEYKVPSKKFKVLGNTDRHSIKKNLIGALLFDSGETAEATRLKRTARRRYTRRKNRICYLQEIFSNEMAKVDDSFFHRLEESFLVEEDKKHERHPIFGNIVDEVAYHEKYPTIYHLRKKLVDSTDKADLRLIYLALAHMIKFRGHFLIEGDLNPDNSDVDKLFIQLVQTYNQLFEENPINASGVDAKAILSARLSKSRRLENLIAQLPGEKKNGLFGNLIALSLGLTPNFKSNFDLAEDAKLQLSKDTYDDDLDNLLAQIGDQYADLFLAAKNLSDAILLSDILRVNTEITKAPLSASMIKRYDEHHQDLTLLKALVRQQLPEKYKEIFFDQSKNGYAGYIDGGASQEEFYKFIKPILEKMDGTEELLVKLNREDLLRKQRTFDNGSIPHQIHLGELHAILRRQEDFYPFLKDNREKIEKILTFRIPYYVGPLARGNSRFAWMTRKSEETITPWNFEEVVDKGASAQSFIERMTNFDKNLPNEKVLPKHSLLYEYFTVYNELTKVKYVTEGMRKPAFLSGEQKKAIVDLLFKTNRKVTVKQLKEDYFKKIECFDSVEISGVEDRFNASLGTYHDLLKIIKDKDFLDNEENEDILEDIVLTLTLFEDREMIEERLKTYAHLFDDKVMKQLKRRRYTGWGRLSRKLINGIRDKQSGKTILDFLKSDGFANRNFMQLIHDDSLTFKEDIQKAQVSGQGDSLHEHIANLAGSPAIKKGILQTVKVVDELVKVMGRHKPENIVIEMARENQTTQKGQKNSRERMKRIEEGIKELGSQILKEHPVENTQLQNEKLYLYYLQNGRDMYVDQELDINRLSDYDVDAIVPQSFLKDDSIDNKVLTRSDKNRGKSDNVPSEEVVKKMKNYWRQLLNAKLITQRKFDNLTKAERGGLSELDKAGFIKRQLVETRQITKHVAQILDSRMNTKYDENDKLIREVKVITLKSKLVSDFRKDFQFYKVREINNYHHAHDAYLNAVVGTALIKKYPKLESEFVYGDYKVYDVRKMIAKSEQEIGKATAKYFFYSNIMNFFKTEITLANGEIRKRPLIETNGETGEIVWDKGRDFATVRKVLSMPQVNIVKKTEVQTGGFSKESILPKRNSDKLIARKKDWDPKKYGGFDSPTVAYSVLVVAKVEKGKSKKLKSVKELLGITIMERSSFEKNPIDFLEAKGYKEVKKDLIIKLPKYSLFELENGRKRMLASAGELQKGNELALPSKYVNFLYLASHYEKLKGSPEDNEQKQLFVEQHKHYLDEIIEQISEFSKRVILADANLDKVLSAYNKHRDKPIREQAENIIHLFTLTNLGAPAAFKYFDTTIDRKRYTSTKEVLDATLIHQSITGLYETRIDLSQLGGDSGGSSGGSCLSYETEILTVEYGLLPIGKIVEKRIECTVYSVDNNGNIYTQPVAQWHDRGEQEVFEYCLEDGSLIRATKDHKFMTVDGQMLPIDEIFERELDLMRVDNLPNSGGSKRTADGSEFEPKKKRKV

SEQ ID NO: 382 - protein, 106 aa, Artificial Sequence
  Synthetic
CLSYETEILTVEYGLLPIGKIVEKRIECTVYSVDNNGNIYTQPVAQWHDRGEQEVFEYCLEDGSLIRATKDHKFMTVDGQMLPIDEIFERELDLMRVDNLPNSGGS

SEQ ID NO: 383 - protein, 780 aa, Artificial Sequence
  Synthetic
MKRTADGSEFESPKKKRKVIKIATRKYLGKQNVYDIGVERDHNFALKNGFIASNCFNSGSETPGTSESATPESSGGSSGGSSTLNIEDEYRLHETSKEPDVSLGSTWLSDFPQAWAETGGMGLAVRQAPLIIPLKATSTPVSIKQYPMSQEARLGIKPHIQRLLDQGILVPCQSPWNTPLLPVKKPGTNDYRPVQDLREVNKRVEDIHPTVPNPYNLLSGLPPSHQWYTVLDLKDAFFCLRLHPTSQPLFAFEWRDPEMGISGQLTWTRLPQGFKNSPTLFDEALHRDLADFRIQHPDLILLQYVDDLLLAATSELDCQQGTRALLQTLGNLGYRASAKKAQICQKQVKYLGYLLKEGQRWLTEARKETVMGQPTPKTPRQLREFLGTAGFCRLWIPGFAEMAAPLYPLTKTGTLFNWGPDQQKAYQEIKQALLTAPALGLPDLTKPFELFVDEKQGYAKGVLTQKLGPWRRPVAYLSKKLDPVAAGWPPCLRMVAAIAVLTKDAGKLTMGQPLVILAPHAVEALVKQPPDRWLSNARMTHYQALLLDTDRVQFGPVVALNPATLLPLPEEGLQHNCLDILAEAHGTRPDLTDQPLPDADHTWYTDGSSLLQEGQRKAGAAVTTETEVIWAKALPAGTSAQRAELIALTQALKMAEGKKLNVYTDSRYAFATAHIHGEIYRRRGLLTSEGKEIKNKDEILALLKALFLPKRLSIIHCPGHQKGHSAEARGNRMADQAARKAAITETPDTSTLLIENSSPSGGSKRTADGSEFEPKKKRKV

SEQ ID NO: 384 - protein, 28 aa, Artificial Sequence
  Synthetic
CFNSGSETPGTSESATPESSGGSSGGSS

SEQ ID NO: 385 - protein, 35 aa, Artificial Sequence
  Synthetic
IKIATRKYLGKQNVYDIGVERDHNFALKNGFIASN

SEQ ID NO: 386 - protein, 881 aa, Artificial Sequence
  Synthetic
MKRTADGSEFESPKKKRKVGKRNYILGLAIGITSVGYGIIDYETRDVIDAGVRLFKEANVENNEGRRSKRGARRLKRRRRHRIQRVKKLLFDYNLLTDHSELSGINPYEARVKGLSQKLSEEEFSAALLHLAKRRGVHNVNEVEEDTGNELSTKEQISRNSKALEEKYVAELQLERLKKDGEVRGSINRFKTSDYVKEAKQLLKVQKAYHQLDQSFIDTYIDLLETRRTYYEGPGEGSPFGWKDIKEWYEMLMGHCTYFPEELRSVKYAYNADLYNALNDLNNLVITRDENEKLEYYEKFQIIENVFKQKKKPTLKQIAKEILVNEEDIKGYRVTSTGKPEFTNLKVYHDIKDITARKEIIENAELLDQIAKILTIYQSSEDIQEELTNLNSELTQEEIEQISNLKGYTGTHNLSLKAINLILDELWHTNDNQIAIFNRLKLVPKKVDLSQQKEIPTTLVDDFILSPVVKRSFIQSIKVINAIIKKYGLPNDIIIELAREKNSKDAQKMINEMQKRNRQTNERIEEIIRTTGKENAKYLIEKIKLHDMQEGKCLYSLEAIPLEDLLNNPFNYEVDHIIPRSVSFDNSFNNKVLVKQEENSKKGNRTPFQYLSSSDSKISYETFKKHILNLAKGKGRISKTKKEYLLEERDINRFSVQKDFINRNLVDTRYATRGLMNLLRSYFRVNNLDVKVKSINGGFTSFLRRKWKFKKERNKGYKHHAEDALIIANADFIFKEWKKLDKAKKVMENQMFEEKQAECLSYETEILTVEYGLLPIGKIVEKRIECTVYSVDNNGNIYTQPVAQWHDRGEQEVFEYCLEDGSLIRATKDHKFMTVDGQMLPIDEIFERELDLMRVDNLPNSGGSKRTADGSEFEPKKKRKV

SEQ ID NO: 387 - protein, 739 aa, Artificial Sequence
  Synthetic
GKRNYILGLAIGITSVGYGIIDYETRDVIDAGVRLFKEANVENNEGRRSKRGARRLKRRRRHRIQRVKKLLFDYNLLTDHSELSGINPYEARVKGLSQKLSEEEFSAALLHLAKRRGVHNVNEVEEDTGNELSTKEQISRNSKALEEKYVAELQLERLKKDGEVRGSINRFKTSDYVKEAKQLLKVQKAYHQLDQSFIDTYIDLLETRRTYYEGPGEGSPFGWKDIKEWYEMLMGHCTYFPEELRSVKYAYNADLYNALNDLNNLVITRDENEKLEYYEKFQIIENVFKQKKKPTLKQIAKEILVNEEDIKGYRVTSTGKPEFTNLKVYHDIKDITARKEIIENAELLDQIAKILTIYQSSEDIQEELTNLNSELTQEEIEQISNLKGYTGTHNLSLKAINLILDELWHTNDNQIAIFNRLKLVPKKVDLSQQKEIPTTLVDDFILSPVVKRSFIQSIKVINAIIKKYGLPNDIIIELAREKNSKDAQKMINEMQKRNRQTNERIEEIIRTTGKENAKYLIEKIKLHDMQEGKCLYSLEAIPLEDLLNNPFNYEVDHIIPRSVSFDNSFNNKVLVKQEENSKKGNRTPFQYLSSSDSKISYETFKKHILNLAKGKGRISKTKKEYLLEERDINRFSVQKDFINRNLVDTRYATRGLMNLLRSYFRVNNLDVKVKSINGGFTSFLRRKWKFKKERNKGYKHHAEDALIIANADFIFKEWKKLDKAKKVMENQMFEEKQAE

SEQ ID NO: 388 - protein, 102 aa, Artificial Sequence
  Synthetic
CLSYETEILTVEYGLLPIGKIVEKRIECTVYSVDNNGNIYTQPVAQWHDRGEQEVFEYCLEDGSLIRATKDHKFMTVDGQMLPIDEIFERELDLMRVDNLPN

SEQ ID NO: 389 - protein, 1099 aa, Artificial Sequence
  Synthetic
MKRTADGSEFESPKKKRKVIKIATRKYLGKQNVYDIGVERDHNFALKNGFIASNCFNEIETEQEYKEIFITPHQIKHIKDFKDYKYSHRVDKKPNRKLINDTLYSTRKDDKGNTLIVNNLNGLYDKDNDKLKKLINKSPEKLLMYHHDPQTYQKLKLIMEQYGDEKNPLYKYYEETGNYLTKYSKKDNGPVIKKIKYYGNKLNAHLDITDDYPNSRNKVVKLSLKPYRFDVYLDNGVYKFVTVKNLDVIKKENYYEVNSKCYEEAKKLKKISNQAEFIASFYKNDLIKINGELYRVIGVNNDLLNRIEVNMIDITYREYLENMNDKRPPHIIKTIASKTQSIKKYSTDILGNLYEVKSKKHPQIIKKGSGGSSGGSSGSETPGTSESATPESSGGSSGGSSTLNIEDEYRLHETSKEPDVSLGSTWLSDFPQAWAETGGMGLAVRQAPLIIPLKATSTPVSIKQYPMSQEARLGIKPHIQRLLDQGILVPCQSPWNTPLLPVKKPGTNDYRPVQDLREVNKRVEDIHPTVPNPYNLLSGLPPSHQWYTVLDLKDAFFCLRLHPTSQPLFAFEWRDPEMGISGQLTWTRLPQGFKNSPTLFDEALHRDLADFRIQHPDLILLQYVDDLLLAATSELDCQQGTRALLQTLGNLGYRASAKKAQICQKQVKYLGYLLKEGQRWLTEARKETVMGQPTPKTPRQLREFLGTAGFCRLWIPGFAEMAAPLYPLTKTGTLFNWGPDQQKAYQEIKQALLTAPALGLPDLTKPFELFVDEKQGYAKGVLTQKLGPWRRPVAYLSKKLDPVAAGWPPCLRMVAAIAVLTKDAGKLTMGQPLVILAPHAVEALVKQPPDRWLSNARMTHYQALLLDTDRVQFGPVVALNPATLLPLPEEGLQHNCLDILAEAHGTRPDLTDQPLPDADHTWYTDGSSLLQEGQRKAGAAVTTETEVIWAKALPAGTSAQRAELIALTQALKMAEGKKLNVYTDSRYAFATAHIHGEIYRRRGLLTSEGKEIKNKDEILALLKALFLPKRLSIIHCPGHQKGHSAEARGNRMADQAARKAAITETPDTSTLLIENSSPSGGSKRTADGSEFEPKKKRKV

SEQ ID NO: 390 - protein, 314 aa, Artificial Sequence
  Synthetic
CFNEIETEQEYKEIFITPHQIKHIKDFKDYKYSHRVDKKPNRKLINDTLYSTRKDDKGNTLIVNNLNGLYDKDNDKLKKLINKSPEKLLMYHHDPQTYQKLKLIMEQYGDEKNPLYKYYEETGNYLTKYSKKDNGPVIKKIKYYGNKLNAHLDITDDYPNSRNKVVKLSLKPYRFDVYLDNGVYKFVTVKNLDVIKKENYYEVNSKCYEEAKKLKKISNQAEFIASFYKNDLIKINGELYRVIGVNNDLLNRIEVNMIDITYREYLENMNDKRPPHIIKTIASKTQSIKKYSTDILGNLYEVKSKKHPQIIKKG

SEQ ID NO: 391 - protein, 1024 aa, Streptococcus pyogenes
MDKKYSIGLDIGTNSVGWAVITDEYKVPSKKFKVLGNTDRHSIKKNLIGALLFDSGETAEATRLKRTARRRYTRRKNRICYLQEIFSNEMAKVDDSFFHRLEESFLVEEDKKHERHPIFGNIVDEVAYHEKYPTIYHLRKKLVDSTDKADLRLIYLALAHMIKFRGHFLIEGDLNPDNSDVDKLFIQLVQTYNQLFEENPINASGVDAKAILSARLSKSRRLENLIAQLPGEKKNGLFGNLIALSLGLTPNFKSNFDLAEDAKLQLSKDTYDDDLDNLLAQIGDQYADLFLAAKNLSDAILLSDILRVNTEITKAPLSASMIKRYDEHHQDLTLLKALVRQQLPEKYKEIFFDQSKNGYAGYIDGGASQEEFYKFIKPILEKMDGTEELLVKLNREDLLRKQRTFDNGSIPHQIHLGELHAILRRQEDFYPFLKDNREKIEKILTFRIPYYVGPLARGNSRFAWMTRKSEETITPWNFEEVVDKGASAQSFIERMTNFDKNLPNEKVLPKHSLLYEYFTVYNELTKVKYVTEGMRKPAFLSGEQKKAIVDLLFKTNRKVTVKQLKEDYFKKIECFDSVEISGVEDRFNASLGTYHDLLKIIKDKDFLDNEENEDILEDIVLTLTLFEDREMIEERLKTYAHLFDDKVMKQLKRRRYTGWGRLSRKLINGIRDKQSGKTILDFLKSDGFANRNFMQLIHDDSLTFKEDIQKAQVSGQGDSLHEHIANLAGSPAIKKGILQTVKVVDELVKVMGRHKPENIVIEMARENQTTQKGQKNSRERMKRIEEGIKELGSQILKEHPVENTQLQNEKLYLYYLQNGRDMYVDQELDINRLSDYDVDAIVPQSFLKDDSIDNKVLTRSDKNRGKSDNVPSEEVVKKMKNYWRQLLNAKLITQRKFDNLTKAERGGLSELDKAGFIKRQLVETRQITKHVAQILDSRMNTKYDENDKLIREVKVITLKSKLVSDFRKDFQFYKVREINNYHHAHDAYLNAVVGTALIKKYPKLESEFVYGDYKVYDVRKMIAK

SEQ ID NO: 392 - protein, 1023 aa, Streptococcus pyogenes
DKKYSIGLDIGTNSVGWAVITDEYKVPSKKFKVLGNTDRHSIKKNLIGALLFDSGETAEATRLKRTARRRYTRRKNRICYLQEIFSNEMAKVDDSFFHRLEESFLVEEDKKHERHPIFGNIVDEVAYHEKYPTIYHLRKKLVDSTDKADLRLIYLALAHMIKFRGHFLIEGDLNPDNSDVDKLFIQLVQTYNQLFEENPINASGVDAKAILSARLSKSRRLENLIAQLPGEKKNGLFGNLIALSLGLTPNFKSNFDLAEDAKLQLSKDTYDDDLDNLLAQIGDQYADLFLAAKNLSDAILLSDILRVNTEITKAPLSASMIKRYDEHHQDLTLLKALVRQQLPEKYKEIFFDQSKNGYAGYIDGGASQEEFYKFIKPILEKMDGTEELLVKLNREDLLRKQRTFDNGSIPHQIHLGELHAILRRQEDFYPFLKDNREKIEKILTFRIPYYVGPLARGNSRFAWMTRKSEETITPWNFEEVVDKGASAQSFIERMTNFDKNLPNEKVLPKHSLLYEYFTVYNELTKVKYVTEGMRKPAFLSGEQKKAIVDLLFKTNRKVTVKQLKEDYFKKIECFDSVEISGVEDRFNASLGTYHDLLKIIKDKDFLDNEENEDILEDIVLTLTLFEDREMIEERLKTYAHLFDDKVMKQLKRRRYTGWGRLSRKLINGIRDKQSGKTILDFLKSDGFANRNFMQLIHDDSLTFKEDIQKAQVSGQGDSLHEHIANLAGSPAIKKGILQTVKVVDELVKVMGRHKPENIVIEMARENQTTQKGQKNSRERMKRIEEGIKELGSQILKEHPVENTQLQNEKLYLYYLQNGRDMYVDQELDINRLSDYDVDAIVPQSFLKDDSIDNKVLTRSDKNRGKSDNVPSEEVVKKMKNYWRQLLNAKLITQRKFDNLTKAERGGLSELDKAGFIKRQLVETRQITKHVAQILDSRMNTKYDENDKLIREVKVITLKSKLVSDFRKDFQFYKVREINNYHHAHDAYLNAVVGTALIKKYPKLESEFVYGDYKVYDVRKMIAK

SEQ ID NO: 393 - protein, 344 aa, Streptococcus pyogenes
SEQEIGKATAKYFFYSNIMNFFKTEITLANGEIRKRPLIETNGETGEIVWDKGRDFATVRKVLSMPQVNIVKKTEVQTGGFSKESILPKRNSDKLIARKKDWDPKKYGGFDSPTVAYSVLVVAKVEKGKSKKLKSVKELLGITIMERSSFEKNPIDFLEAKGYKEVKKDLIIKLPKYSLFELENGRKRMLASAGELQKGNELALPSKYVNFLYLASHYEKLKGSPEDNEQKQLFVEQHKHYLDEIIEQISEFSKRVILADANLDKVLSAYNKHRDKPIREQAENIIHLFTLTNLGAPAAFKYFDTTIDRKRYTSTKEVLDATLIHQSITGLYETRIDLSQLGGD

SEQ ID NO: 394 - protein, 1165 aa, Artificial Sequence
  Synthetic
MKRTADGSEFESPKKKRKVDKKYSIGLDIGTNSVGWAVITDEYKVPSKKFKVLGNTDRHSIKKNLIGALLFDSGETAEATRLKRTARRRYTRRKNRICYLQEIFSNEMAKVDDSFFHRLEESFLVEEDKKHERHPIFGNIVDEVAYHEKYPTIYHLRKKLVDSTDKADLRLIYLALAHMIKFRGHFLIEGDLNPDNSDVDKLFIQLVQTYNQLFEENPINASGVDAKAILSARLSKSRRLENLIAQLPGEKKNGLFGNLIALSLGLTPNFKSNFDLAEDAKLQLSKDTYDDDLDNLLAQIGDQYADLFLAAKNLSDAILLSDILRVNTEITKAPLSASMIKRYDEHHQDLTLLKALVRQQLPEKYKEIFFDQSKNGYAGYIDGGASQEEFYKFIKPILEKMDGTEELLVKLNREDLLRKQRTFDNGSIPHQIHLGELHAILRRQEDFYPFLKDNREKIEKILTFRIPYYVGPLARGNSRFAWMTRKSEETITPWNFEEVVDKGASAQSFIERMTNFDKNLPNEKVLPKHSLLYEYFTVYNELTKVKYVTEGMRKPAFLSGEQKKAIVDLLFKTNRKVTVKQLKEDYFKKIECFDSVEISGVEDRFNASLGTYHDLLKIIKDKDFLDNEENEDILEDIVLTLTLFEDREMIEERLKTYAHLFDDKVMKQLKRRRYTGWGRLSRKLINGIRDKQSGKTILDFLKSDGFANRNFMQLIHDDSLTFKEDIQKAQVSGQGDSLHEHIANLAGSPAIKKGILQTVKVVDELVKVMGRHKPENIVIEMARENQTTQKGQKNSRERMKRIEEGIKELGSQILKEHPVENTQLQNEKLYLYYLQNGRDMYVDQELDINRLSDYDVDAIVPQSFLKDDSIDNKVLTRSDKNRGKSDNVPSEEVVKKMKNYWRQLLNAKLITQRKFDNLTKAERGGLSELDKAGFIKRQLVETRQITKHVAQILDSRMNTKYDENDKLIREVKVITLKSKLVSDFRKDFQFYKVREINNYHHAHDAYLNAVVGTALIKKYPKLESEFVYGDYKVYDVRKMIAKCLSYETEILTVEYGLLPIGKIVEKRIECTVYSVDNNGNIYTQPVAQWHDRGEQEVFEYCLEDGSLIRATKDHKFMTVDGQMLPIDEIFERELDLMRVDNLPNSGGSKRTADGSEFEPKKKRKV

SEQ ID NO: 395 - protein, 1128 aa, Artificial Sequence
  Synthetic
MKRTADGSEFESPKKKRKVIKIATRKYLGKQNVYDIGVERDHNFALKNGFIASNCFNEIGKATAKYFFYSNIMNFFKTEITLANGEIRKRPLIETNGETGEIVWDKGRDFATVRKVLSMPQVNIVKKTEVQTGGFSKESILPKRNSDKLIARKKDWDPKKYGGFDSPTVAYSVLVVAKVEKGKSKKLKSVKELLGITIMERSSFEKNPIDFLEAKGYKEVKKDLIIKLPKYSLFELENGRKRMLASAGELQKGNELALPSKYVNFLYLASHYEKLKGSPEDNEQKQLFVEQHKHYLDEIIEQISEFSKRVILADANLDKVLSAYNKHRDKPIREQAENIIHLFTLTNLGAPAAFKYFDTTIDRKRYTSTKEVLDATLIHQSITGLYETRIDLSQLGGDSGGSSGGSSGSETPGTSESATPESSGGSSGGSSTLNIEDEYRLHETSKEPDVSLGSTWLSDFPQAWAETGGMGLAVRQAPLIIPLKATSTPVSIKQYPMSQEARLGIKPHIQRLLDQGILVPCQSPWNTPLLPVKKPGTNDYRPVQDLREVNKRVEDIHPTVPNPYNLLSGLPPSHQWYTVLDLKDAFFCLRLHPTSQPLFAFEWRDPEMGISGQLTWTRLPQGFKNSPTLFNEALHRDLADFRIQHPDLILLQYVDDLLLAATSELDCQQGTRALLQTLGNLGYRASAKKAQICQKQVKYLGYLLKEGQRWLTEARKETVMGQPTPKTPRQLREFLGKAGFCRLFIPGFAEMAAPLYPLTKPGTLFNWGPDQQKAYQEIKQALLTAPALGLPDLTKPFELFVDEKQGYAKGVLTQKLGPWRRPVAYLSKKLDPVAAGWPPCLRMVAAIAVLTKDAGKLTMGQPLVILAPHAVEALVKQPPDRWLSNARMTHYQALLLDTDRVQFGPVVALNPATLLPLPEEGLQHNCLDILAEAHGTRPDLTDQPLPDADHTWYTDGSSLLQEGQRKAGAAVTTETEVIWAKALPAGTSAQRAELIALTQALKMAEGKKLNVYTDSRYAFATAHIHGEIYRRRGWLTSEGKEIKNKDEILALLKALFLPKRLSIIHCPGHQKGHSAEARGNRMADQAARKAAITETPDTSTLLIENSSPSGGSKRTADGSEFEPKKKRK

SEQ ID NO: 396 - protein, 253 aa, Homo Sapiens
MANLGCWMLVLFVATWSDLGLCKKRPKPGGWNTGGSRYPGQGSPGGNRYPPQGGGGWGQPHGGGWGQPHGGGWGQPHGGGWGQPHGGGWGQGGGTHSQWNKPSKPKTNMKHMAGAAAAGAVVGGLGGYMLGSAMSRPIIHFGSDYEDRYYRENMHRYPNQVYYRPMDEYSNQNNFVHDCVNITIKQHTVTTTTKGENFTETDVKMMERVVEQMCITQYERESQAYYQRGSSMVLFSSPPVILLISFLIFLIVG

SEQ ID NO: 397 - DNA, 2365 bp, Homo Sapiens
gcgaaccttggctgctggatgctggttctctttgtggccacatggagtgacctgggcctctgcaagaagcgcccgaagcctggaggatggaacactgggggcagccgatacccggggcagggcagccctggaggcaaccgctacccacctcagggcggtggtggctgggggcagcctcatggtggtggctgggggcagcctcatggtggtggctgggggcagccccatggtggtggctggggacagcctcatggtggtggctggggtcaaggaggtggcacccacagtcagtggaacaagccgagtaagccaaaaaccaacatgaagcacatggctggtgctgcagcagctggggcagtggtggggggccttggcggctacatgctgggaagtgccatgagcaggcccatcatacatttcggcagtgactatgaggaccgttactatcgtgaaaacatgcaccgttaccccaaccaagtgtactacaggcccatggatgagtacagcaaccagaacaactttgtgcacgactgcgtcaatatcacaatcaagcagcacacggtcaccacaaccaccaagggggagaacttcaccgagaccgacgttaagatgatggagcgcgtggttgagcagatgtgtatcacccagtacgagagggaatctcaggcctattaccagagaggatcgagcatggtcctcttctcctctccacctgtgatcctcctgatctctttcctcatcttcctgatagtgggatgaggaaggtcttcctgttttcaccatctttctaatctttttccagcttgagggaggcggtatccacctgcagcccttttagtggtggtgtctcactctttcttctctctttgtcccggataggctaatcaatacccttggcactgatgggcactggaaaacatagagtagacctgagatgctggtcaagccccctttgattgagttcatcatgagccgttgctaatgccaggccagtaaaagtataacagcaaataaccattggttaatctggacttatttttggacttagtgcaacaggttgaggctaaaacaaatctcagaacagtctgaaatacctttgcctggatacctctggctccttcagcagctagagctcagtatactaatgccctatcttagtagagatttcatagctatttagagatattttccattttaagaaaacccgacaacatttctgccaggtttgttaggaggccacatgatacttattcaaaaaaatcctagagattcttagctcttgggatgcaggctcagcccgctggagcatgagctctgtgtgtaccgagaactggggtgatgttttacttttcacagtatgggctacacagcagctgttcaacaagagtaaatattgtcacaacactgaacctctggctagaggacatattcacagtgaacataactgtaacatatatgaaaggcttctgggacttgaaatcaaatgtttgggaatggtgcccttggaggcaacctcccattttagatgtttaaaggaccctatatgtggcattcctttctttaaactataggtaattaaggcagctgaaaagtaaattgccttctagacactgaaggcaaatctcctttgtccatttacctggaaaccagaatgattttgacatacaggagagctgcagttgtgaaagcaccatcatcatagaggatgatgtaattaaaaaatggtcagtgtgcaaagaaaagaactgcttgcatttctttatttctgtctcataattgtcaaaaaccagaattaggtcaagttcatagtttctgtaattggcttttgaatcaaagaatagggagacaatctaaaaaatatcttaggttggagatgacagaaatatgattgatttgaagtggaaaaagaaattctgttaatgttaattaaagtaaaattattccctgaattgtttgatattgtcacctagcagatatgtattacttttctgcaatgttattattggcttgcactttgtgagtattctatgtaaaaatatatatgtatataaaatatatattgcataggacagacttaggagttttgtttagagcagttaacatctgaagtgtctaatgcattaacttttgtaaggtactgaatacttaatatgtgggaaacccttttgcgtggtccttaggcttacaatgtgcactgaatcgtttcatgtaagaatccaaagtggacaccattaacaggtctttgaaatatgcatgtactttatattttctatatttgtaactttgcatgttcttgttttgttatataaaaaaattgtaaatgtttaatatctgactgaaattaaacgagcgaagatgagcacca

SEQ ID NO: 398 - protein, 253 aa, Artificial Sequence
  Synthetic
MANLGCWMLVLFVATWSDLGLCKKRPKPGGWNTGGSRYPGQGSPGGNRYPPQGGGGWGQPHGGGWGQPHGGGWGQPHGGGWGQPHGGGWGQGGGTHSQWNKPSKPKTNMKHMAGAAAAGAVVGGLGGYMLGSAMSRPIIHFGSDYEDRYYRENMHRYPNQVYYRPMDEYSNQNNFVHNCVNITIKQHTVTTTTKGENFTETDVKMMERVVEQMCITQYERESQAYYQRGSSMVLFSSPPVILLISFLIFLIVG

SEQ ID NO: 399 - protein, 253 aa, Artificial Sequence
  Synthetic
MANLGCWMLVLFVATWSDLGLCKKRPKPGGWNTGGSRYPGQGSPGGNRYPPQGGGGWGQPHGGGWGQPHGGGWGQPHGGGWGQPHGGGWGQGGGTHSQWNKPSKPKTNMKHMAGAAAAGAVVGGLGGYMLGSAMSRPIIHFGSDYEDRYYRENMHRYPNQVYYRPMDEYSNQNNFVHDCVNITIKQHKVTTTTKGENFTETDVKMMERVVEQMCITQYERESQAYYQRGSSMVLFSSPPVILLISFLIFLIVG

SEQ ID NO: 400 - protein, 253 aa, Artificial Sequence
  Synthetic
MANLGCWMLVLFVATWSDLGLCKKRPKPGGWNTGGSRYPGQGSPGGNRYPPQGGGGWGQPHGGGWGQPHGGGWGQPHGGGWGQPHGGGWGQGGGTHSQWNKPSKPKTNMKHMAGAAAAGAVVGGLGGYMLGSAMSRPIIHFGSDYEDRYYRENMHRYPNQVYYRPMDEYSNQNNFVHDCVNITIKQHTVTTTTKGKNFTETDVKMMERVVEQMCITQYERESQAYYQRGSSMVLFSSPPVILLISFLIFLIVG

SEQ ID NO: 401 - protein, 240 aa, Artificial Sequence
  Synthetic
MANLGCWMLVLFVATWSDLGLCKKRPKPGGWNTGGSRYPGQGSPGGNRYPPQGGGGWGQPHGGGWGQPHGGGWGQPHGGGWGQPHGGGWGQGGGTHSQWNKPSKPKTNMKHMAGAAAAGAVVGGLGGYMLGSAMSRPIIHFGSDYEDRYYRENMHRYPNQVYYRPMDEYSNQNNFVHDCVNITIKQHTVTTTTKGANFTETDVKMMERVVEQMCITQYERESQAYYQRGSSMVLFSSPPV

SEQ ID NO: 402 - protein, 253 aa, Artificial Sequence
  Synthetic
MANLGCWMLVLFVATWSDLGLCKKRPKPGGWNTGGSRYPGQGSPGGNRYPPQGGGGWGQPHGGGWGQPHGGGWGQPHGGGWGQPHGGGWGQGGGTHSQWNKPSKPKTNMKHMAGAAAAGAVVGGLGGYMLGSAMSRPIIHFGSDYEDRYYRENMHRYPNQVYYRPMDEYSNQNNFVHDCVNITIKQHTVTTTTKGENFTKTDVKMMERVVEQMCITQYERESQAYYQRGSSMVLFSSPPVILLISFLIFLIVG

SEQ ID NO: 403 - protein, 240 aa, Artificial Sequence
  Synthetic
MANLGCWMLVLFVATWSDLGLCKKRPKPGGWNTGGSRYPGQGSPGGNRYPPQGGGGWGQPHGGGWGQPHGGGWGQPHGGGWGQPHGGGWGQGGGTHSQWNKPSKPKTNMKHMAGAAAAGAVVGGLGGYMLGSAMSRPIIHFGSDYEDRYYRENMHRYPNQVYYRPMDEYSNQNNFVHDCVNITIKQHTVTTTTKGENFTGTDVKMMERVVEQMCITQYERESQAYYQRGSSMVLFSSPPV

SEQ ID NO: 404 - protein, 253 aa, Artificial Sequence
  Synthetic
MANLGCWMLVLFVATWSDLGLCKKRPKPGGWNTGGSRYPGQGSPGGNRYPPQGGGGWGQPHGGGWGQPHGGGWGQPHGGGWGQPHGGGWGQGGGTHSQWNKPSKPKTNMKHMAGAAAAGAVVGGLGGYMLGSAMSRPIIHFGSDYEDRYYRENMHRYPNQVYYRPMDEYSNQNNFVHDCVNITIKQHTVTTTTKGENFTETDIKMMERVVEQMCITQYERESQAYYQRGSSMVLFSSPPVILLISFLIFLIVG

SEQ ID NO: 405 - protein, 253 aa, Artificial Sequence
  Synthetic
MANLGCWMLVLFVATWSDLGLCKKRPKPGGWNTGGSRYPGQGSPGGNRYPPQGGGGWGQPHGGGWGQPHGGGWGQPHGGGWGQPHGGGWGQGGGTHSQWNKPSKPKTNMKHMAGAAAAGAVVGGLGGYMLGSAMSRPIIHFGSDYEDRYYRENMHRYPNQVYYRPMDEYSNQNNFVHDCVNITIKQHTVTTTTKGENFTETDVKMMEHVVEQMCITQYERESQAYYQRGSSMVLFSSPPVILLISFLIFLIVG

SEQ ID NO: 406 - protein, 253 aa, Artificial Sequence
  Synthetic
MANLGCWMLVLFVATWSDLGLCKKRPKPGGWNTGGSRYPGQGSPGGNRYPPQGGGGWGQPHGGGWGQPHGGGWGQPHGGGWGQPHGGGWGQGGGTHSQWNKPSKPKTNMKHMAGAAAAGAVVGGLGGYMLGSAMSRPIIHFGSDYEDRYYRENMHRYPNQVYYRPMDEYSNQNNFVHDCVNITIKQHTVTTTTKGENFTETDVKMMERVIEQMCITQYERESQAYYQRGSSMVLFSSPPVILLISFLIFLIVG

SEQ ID NO: 407 - protein, 253 aa, Artificial Sequence
  Synthetic
MANLGCWMLVLFVATWSDLGLCKKRPKPGGWNTGGSRYPGQGSPGGNRYPPQGGGGWGQPHGGGWGQPHGGGWGQPHGGGWGQPHGGGWGQGGGTHSQWNKPSKPKTNMKHMAGAAAAGAVVGGLGGYMLGSAMSRPIIHFGSDYEDRYYRENMHRYPNQVYYRPMDEYSNQNNFVHDCVNITIKQHTVTTTTKGENFTETDVKMMERVVQQMCITQYERESQAYYQRGSSMVLFSSPPVILLISFLIFLIVG

SEQ ID NO: 408 - protein, 253 aa, Artificial Sequence
  Synthetic
MANLGCWMLVLFVATWSDLGLCKKRPKPGGWNTGGSRYPGQGSPGGNRYPPQGGGGWGQPHGGGWGQPHGGGWGQPHGGGWGQPHGGGWGQGGGTHSQWNKPSKPKTNMKHMAGAAAAGAVVGGLGGYMLGSAMSRPIIHFGSDYEDRYYRENMHRYPNQVYYRPMDEYSNQNNFVHDCVNITIKQHTVTTTTKGENFTETDVKMMERVVEQMCITQYERESQAYYQRGSSRVLFSSPPVILLISFLIFLIVG

SEQ ID NO: 409 - protein, 253 aa, Artificial Sequence
  Synthetic
MANLGCWMLVLFVATWSDLGLCKKRPKPGGWNTGGSRYPGQGSPGGNRYPPQGGGGWGQPHGGGWGQPHGGGWGQPHGGGWGQPHGGGWGQGGGTHSQWNKLSKPKTNMKHMAGAAAAGAVVGGLGGYMLGSAMSRPIIHFGSDYEDRYYRENMHRYPNQVYYRPMDEYSNQNNFVHDCVNITIKQHTVTTTTKGENFTETDVKMMERVVEQMCITQYERESQAYYQRGSSMVLFSSPPVILLISFLIFLIVG

SEQ ID NO: 410 - protein, 253 aa, Artificial Sequence
  Synthetic
MANLGCWMLVLFVATWSDLGLCKKRPKPGGWNTGGSRYPGQGSPGGNRYPPQGGGGWGQPHGGGWGQPHGGGWGQPHGGGWGQPHGGGWGQGGGTHSQWNKPSKLKTNMKHMAGAAAAGAVVGGLGGYMLGSAMSRPIIHFGSDYEDRYYRENMHRYPNQVYYRPMDEYSNQNNFVHDCVNITIKQHTVTTTTKGENFTETDVKMMERVVEQMCITQYERESQAYYQRGSSMVLFSSPPVILLISFLIFLIVG

SEQ ID NO: 411 - protein, 253 aa, Artificial Sequence
  Synthetic
MANLGCWMLVLFVATWSDLGLCKKRPKPGGWNTGGSRYPGQGSPGGNRYPPQGGGGWGQPHGGGWGQPHGGGWGQPHGGGWGQPHGGGWGQGGGTHSQWNKPSKPKTNMKHMAGAAVAGAVVGGLGGYMLGSAMSRPIIHFGSDYEDRYYRENMHRYPNQVYYRPMDEYSNQNNFVHDCVNITIKQHTVTTTTKGENFTETDVKMMERVVEQMCITQYERESQAYYQRGSSMVLFSSPPVILLISFLIFLIVG

SEQ ID NO: 412 - protein, 253 aa, Artificial Sequence
  Synthetic
MANLGCWMLVLFVATWSDLGLCKKRPKPGGWNTGGSRYPGQGSPGGNRYPPQGGGGWGQPHGGGWGQPHGGGWGQPHGGGWGQPHGGGWGQGGGTHSQWNKPSKPKTNMKHMAGAAAAGAVVGGLGGYMLVSAMSRPIIHFGSDYEDRYYRENMHRYPNQVYYRPMDEYSNQNNFVHDCVNITIKQHTVTTTTKGENFTETDVKMMERVVEQMCITQYERESQAYYQRGSSMVLFSSPPVILLISFLIFLIVG

SEQ ID NO: 413 - protein, 253 aa, Artificial Sequence
  Synthetic
MANLGCWMLVLFVATWSDLGLCKKRPKPGGWNTGGSRYPGQGSPGGNRYPPQGGGGWGQPHGGGWGQPHGGGWGQPHGGGWGQPHGGGWGQGGGTHSQWNKPSKPKTNMKHMAGAAAAGAVVGGLGGYMLGSAMSRPIIHFGSDYEDRYYRENMHRYPNQVYYRPMDEYSNQNNFGHDCVNITIKQHTVTTTTKGENFTETDVKMMERVVEQMCITQYERESQAYYQRGSSMVLFSSPPVILLISFLIFLIVG

SEQ ID NO: 414 - protein, 253 aa, Artificial Sequence
  Synthetic
MANLGCWMLVLFVATWSDLGLCKKRPKPGGWNTGGSRYPGQGSPGGNRYPPQGGGGWGQPHGGGWGQPHGGGWGQPHGGGWGQPHGGGWGQGGGTHSQWNKPSKPKTNMKHMAGAAAAGAVVGGLGGYMLGSAMSRPIIHFGSDYEDRYYRENMHRYPNQVYYRPMDEYSNQNNFVHDCVNITIKQRTVTTTTKGENFTETDVKMMERVVEQMCITQYERESQAYYQRGSSMVLFSSPPVILLISFLIFLIVG

SEQ ID NO: 415 - protein, 253 aa, Artificial Sequence
  Synthetic
MANLGCWMLVLFVATWSDLGLCKKRPKPGGWNTGGSRYPGQGSPGGNRYPPQGGGGWGQPHGGGWGQPHGGGWGQPHGGGWGQPHGGGWGQGGGTHSQWNKPSKPKTNMKHMAGAAAAGAVVGGLGGYMLGSAMSRPIIHFGSDYEDRYYRENMHRYPNQVYYRPMDEYSNQNNFVHDCVNITIKQHTVTTTTKGENSTETDVKMMERVVEQMCITQYERESQAYYQRGSSMVLFSSPPVILLISFLIFLIVG

SEQ ID NO: 416 - protein, 253 aa, Artificial Sequence
  Synthetic
MANLGCWMLVLFVATWSDLGLCKKRPKPGGWNTGGSRYPGQGSPGGNRYPPQGGGGWGQPHGGGWGQPHGGGWGQPHGGGWGQPHGGGWGQGGGTHSQWNKPSKPKTNMKHMAGAAAAGAVVGGLGGYMLGSAMSRPIIHFGSDYEDRYYRENMHRYPNQVYYRPMDEYSNQNNFVHDCVNITIKQHTVTTTTKGENFTETNVKMMERVVEQMCITQYERESQAYYQRGSSMVLFSSPPVILLISFLIFLIVG

SEQ ID NO: 417 - protein, 253 aa, Artificial Sequence
  Synthetic
MANLGCWMLVLFVATWSDLGLCKKRPKPGGWNTGGSRYPGQGSPGGNRYPPQGGGGWGQPHGGGWGQPHGGGWGQPHGGGWGQPHGGGWGQGGGTHSQWNKPSKPKTNMKHMAGAAAAGAVVGGLGGYMLGSAMSRPIIHFGSDYEDRYYRENMHRYPNQVYYRPMDEYSNQNNFVHDCVNITIKQHTVTTTTKGENFTETDVKMMERVVEPMCITQYERESQAYYQRGSSMVLFSSPPVILLISFLIFLIVG

SEQ ID NO: 418 - protein, 253 aa, Artificial Sequence
  Synthetic
MANLGCWMLVLFVATWSDLGLCKKRPKPGGWNTGGSRYPGQGSPGGNRYPPQGGGGWGQPHGGGWGQPHGGGWGQPHGGGWGQPHGGGWGQGGGTHSQWNKPSKPKTNMKHMAGAAAAGAVVGGLGGYMLGSAMSRPIIHFGSDYEDRYYRENMHRYPNQVYYRPMDEYSNQNNFVHDCVNITIKQHTVTTTTKGENFTETDVKMMERVVEQMCITRYERESQAYYQRGSSMVLFSSPPVILLISFLIFLIVG

SEQ ID NO: 419 - protein, 253 aa, Artificial Sequence
  Synthetic
MANLGCWMLVLFVATWSDLGLCKKRPKPGGWNTGGSRYPGQGSPGGNRYPPQGGGGWGQPHGGGWGQPHGGGWGQPHGGGWGQPHGGGWGQGGGTHSQWNKPSKPKTNMKHMAGAAAAGAVVGGLGGYMLGSAMSRPIIHFGSDYEDRYYRENMHRYPNQVYYRPMDEYSNQNNFVHDCVNITIKQHTVTTTTKGENFTETDVKMMERVVEQMCITQYERESQAYYQRGSSTVLFSSPPVILLISFLIFLIVG

SEQ ID NO: 420 - protein, 253 aa, Artificial Sequence
  Synthetic
MANLGCWMLVLFVATWSDLGLCKKRPKPGGWNTGGSRYPGQGSPGGNRYPPQGGGGWGQPHGGGWGQPHGGGWGQPHGGGWGQPHGGGWGQGGGTHSQWNKPSKPKTNMKHMAGAAAAGAVVGGLGSYMLGSAMSRPIIHFGSDYEDRYYRENMHRYPNQVYYRPMDEYSNQNNFVHDCVNITIKQHTVTTTTKGENFTETDVKMMERVVEQMCITQYERESQAYYQRGSSMVLFSSPPVILLISFLIFLIVG

SEQ ID NO: 421 - protein, 253 aa, Artificial Sequence
  Synthetic
MANLGCWMLVLFVATWSDLGLCKKRPKPGGWNTGGSRYPGQGSPGGNRYPPQGGGGWGQPHGGGWGQPHGGGWGQPHGGGWGQPHGGGWGQGGGTHSQWNKPSKPKTNMKHMAGAAAAGAVVGGLGVYMLGSAMSRPIIHFGSDYEDRYYRENMHRYPNQVYYRPMDEYSNQNNFVHDCVNITIKQHTVTTTTKGENFTETDVKMMERVVEQMCITQYERESQAYYQRGSSMVLFSSPPVILLISFLIFLIVG

SEQ ID NO: 422 - protein, 253 aa, Artificial Sequence
  Synthetic
MANLGCWMLVLFVATWSDLGLCKKRPKPGGWNTGGSRYPGQGSPGGNRYPPQGGGGWGQPHGGGWGQPHGGGWGQPHGGGWGQPHGGGWGQGGGTHSQWNKPSKPKTNMKHMAGAAAAGAVVGGLGGYVLGSAMSRPIIHFGSDYEDRYYRENMHRYPNQVYYRPMDEYSNQNNFVHDCVNITIKQHTVTTTTKGENFTETDVKMMERVVEQMCITQYERESQAYYQRGSSMVLFSSPPVILLISFLIFLIVG

SEQ ID NO: 423 - protein, 253 aa, Artificial Sequence
  Synthetic
MANLGCWMLVLFVATWSDLGLCKKRPKPGGWNTGGSRYPGQGSPGGNRYPPQGGGGWGQPHGGGWGQPHGGGWGQPHGGGWGQPHGGGWGQGGGTHSQWNKPSKPKTNMKHMAGAAAAGAVVGGLGGYMLGSAMSRPIIHFGSDYEDRYYRENMHRYPNQVYYRPMGEYSNQNNFVHDCVNITIKQHTVTTTTKGENFTETDVKMMERVVEQMCITQYERESQAYYQRGSSMVLFSSPPVILLISFLIFLIVG

SEQ ID NO: 424 - protein, 253 aa, Artificial Sequence
  Synthetic
MANLGCWMLVLFVATWSDLGLCKKRPKPGGWNTGGSRYPGQGSPGGNRYPPQGGGGWGQPHGGGWGQPHGGGWGQPHGGGWGQPHGGGWGQGGGTHSQWNKPSKPKTNMKHMAGAAAAGAVVGGLGGYMLGSAMSRPIIHFGSDYEDRYYRENMHRYPNQVYYRPMNEYSNQNNFVHDCVNITIKQHTVTTTTKGENFTETDVKMMERVVEQMCITQYERESQAYYQRGSSMVLFSSPPVILLISFLIFLIVG

SEQ ID NO: 425 - protein, 253 aa, Artificial Sequence
  Synthetic
MANLGCWMLVLFVATWSDLGLCKKRPKPGGWNTGGSRYPGQGSPGGNRYPPQGGGGWGQPHGGGWGQPHGGGWGQPHGGGWGQPHGGGWGQGGGTHSQWNKPSKPKTNMKHMAGAAAAGAVVGGLGGYMLGSAMSRPIIHFGSDYEDRYYRENMHRYPNQVYYRPMDEYSSQNNFVHDCVNITIKQHTVTTTTKGENFTETDVKMMERVVEQMCITQYERESQAYYQRGSSMVLFSSPPVILLISFLIFLIVG

SEQ ID NO: 426 - protein, 253 aa, Artificial Sequence [sequence omitted]

SEQ ID NO: 427 - protein, 253 aa, Artificial Sequence
  Synthetic
MANLGCWMLVLFVATWSDLGLCKKRPKPGGWNTGGSRYPGQGSPGGNRYPPQGGGGWGQPHGGGWGQPHGGGWGQPHGGGWGQPHGGGWGQGGGTHSQWNKPSKPKTNMKHMAGAAAAGAVVGGLGGYMLGSAMSRPIIHFGSDYEDRYYRENMHRYPNQVYYRPMDEYSNQNNFVHDCVNITIKQHTVTTTTKGENFTETDVKMMERVVEQMCITQYERESQAYYQRGSSMVLFSSSPVILLISFLIFLIVG

SEQ ID NO: 428 - skipped

SEQ ID NO: 429 - DNA, 188 bp, Artificial Sequence; identical to SEQ ID NO: 254
  Synthetic

SEQ ID NO: 430 - DNA, 125 bp, Artificial Sequence; identical to SEQ ID NO: 255
  Synthetic

SEQ ID NO: 431 - DNA, 190 bp, Artificial Sequence; identical to SEQ ID NO: 256
  Synthetic

SEQ ID NO: 432 - DNA, 201 bp, Artificial Sequence; identical to SEQ ID NO: 257
  Synthetic

SEQ ID NO: 433 - DNA, 201 bp, Artificial Sequence; identical to SEQ ID NO: 258
  Synthetic

SEQ ID NO: 434 - DNA, 201 bp, Artificial Sequence; identical to SEQ ID NO: 259
  Synthetic

SEQ ID NO: 435 - DNA, 201 bp, Artificial Sequence; identical to SEQ ID NO: 260
  Synthetic

SEQ ID NO: 436 - DNA, 201 bp, Artificial Sequence; identical to SEQ ID NO: 261
  Synthetic

SEQ ID NO: 437 - DNA, 201 bp, Artificial Sequence; identical to SEQ ID NO: 262
  Synthetic

SEQ ID NO: 438 - DNA, 201 bp, Artificial Sequence; identical to SEQ ID NO: 263
  Synthetic

SEQ ID NO: 439 - DNA, 203 bp, Artificial Sequence; identical to SEQ ID NO: 264
  Synthetic

SEQ ID NO: 440 - DNA, 203 bp, Artificial Sequence; identical to SEQ ID NO: 265
  Synthetic

SEQ ID NO: 441 - DNA, 203 bp, Artificial Sequence; identical to SEQ ID NO: 266
  Synthetic

SEQ ID NO: 442 - DNA, 203 bp, Artificial Sequence; identical to SEQ ID NO: 267
  Synthetic

SEQ ID NO: 443 - DNA, 203 bp, Artificial Sequence; identical to SEQ ID NO: 268
  Synthetic

SEQ ID NO: 444 - DNA, 203 bp, Artificial Sequence; identical to SEQ ID NO: 269
  Synthetic

SEQ ID NO: 445 - DNA, 203 bp, Artificial Sequence; identical to SEQ ID NO: 270
  Synthetic

SEQ ID NO: 446 - DNA, 192 bp, Artificial Sequence; identical to SEQ ID NO: 271
  Synthetic

SEQ ID NO: 447 - DNA, 203 bp, Artificial Sequence; identical to SEQ ID NO: 272
  Synthetic

SEQ ID NO: 448 - DNA, 203 bp, Artificial Sequence; identical to SEQ ID NO: 273
  Synthetic

SEQ ID NO: 449 - DNA, 203 bp, Artificial Sequence; identical to SEQ ID NO: 274
  Synthetic

SEQ ID NO: 450 - DNA, 203 bp, Artificial Sequence; identical to SEQ ID NO: 275
  Synthetic

SEQ ID NO: 451 - DNA, 203 bp, Artificial Sequence; identical to SEQ ID NO: 276
  Synthetic

SEQ ID NO: 452 - DNA, 203 bp, Artificial Sequence; identical to SEQ ID NO: 277
  Synthetic

SEQ ID NO: 453 - DNA, 203 bp, Artificial Sequence; identical to SEQ ID NO: 278
  Synthetic

SEQ ID NO: 454 - DNA, 182 bp, Artificial Sequence; identical to SEQ ID NO: 279
  Synthetic

SEQ ID NO: 455 - DNA, 193 bp, Artificial Sequence; identical to SEQ ID NO: 280
  Synthetic

SEQ ID NO: 456 - DNA, 193 bp, Artificial Sequence; identical to SEQ ID NO: 281
  Synthetic

SEQ ID NO: 457 - RNA, 68 nt, Artificial Sequence
  Synthetic
ggccggcauggucccagccuccucgcuggcgccggcugggcaacaugcuucggcauggcgaaugggac

SEQ ID NO: 458 - DNA, 3160 bp, Artificial Sequence
  Synthetic
tagttattaatagtaatcaattacggggtcattagttcatagcccatatatggagttccgcgttacataacttacggtaaatggcccgcctggctgaccgcccaacgacccccgcccattgacgtcaataatgacgtatgttcccatagtaacgccaatagggactttccattgacgtcaatgggtggagtatttacggtaaactgcccacttggcagtacatcaagtgtatcatatgccaagtacgccccctattgacgtcaatgacggtaaatggcccgcctggcattatgcccagtacatgaccttatgggactttcctacttggcagtacatctacgtattagtcatcgctattaccatggtgatgcggttttggcagtacatcaatgggcgtggatagcggtttgactcacggggatttccaagtctccaccccattgacgtcaatgggagtttgttttggcaccaaaatcaacgggactttccaaaatgtcgtaacaactccgccccattgacgcaaatgggcggtaggcgtgtacggtgggaggtctatataagcagagctggtttagtgaaccgtcagatcgttcactgccgtataggcagggcccagactgagcacggttttagagctagaaatagcaagttaaaataaggctagtccgttatcaacttgaaaaagtgggaccgagtcggtcctggaggaagcagggcttcctttcctctgccatcaaaatttctttccatcttcaagcatcccggtgtagtgcaccacgcaggtctggccgcgcttggggaaggtgcgcccgtctcctggggagatggtttccacctgcactcccgtgctcagtctgttttagggtcatgaaggtttttcttttcctgagaaaacaacacgtattgttttctcaggttttgctttttggcctttttctagcttaaaaaaaaaaaaagcaaaagatgctggtggttggcactcctggtttccaggacggggttcaaatccctgcggcgtctttgctttgacttttttttaagcttgggccgctcgaggtagcagcggcctccgcgccgggttttggcgcctcccgcgggcgcccccctcctcacggcgagcgctgccacgtcagacgaagggcgcaggagcgttcctgatccttccgcccggacgctcaggacagcggcccgctgctcataagactcggccttagaaccccagtatcagcagaaggacattttaggacgggacttgggtgactctagggcactggttttctttccagagagcggaacaggcgaggaaaagtagtcccttctcggcgattctgcggagggatctccgtggggcggtgaacgccgatgattatataaggacgcgccgggtgtggcacagctagttccgtcgcagccgggatttgggtcgcggttcttgtttgtggatcgctgtgatcgtcacttggtgagttgcgggctgctgggctggccggggctttcgtggccgccgggccgctcggtgggacggaagcgtgtggagagaccgccaagggctgtagtctgggtccgcgagcaaggttgccctgaactgggggttggggggagcgcacaaaatggcggctgttcccgagtcttgaatggaagacgcttgtaaggcgggctgtgaggtcgttgaaacaaggtggggggcatggtgggcggcaagaacccaaggtcttgaggccttcgctaatgcgggaaagctcttattcgggtgagatgggctggggcaccatctggggaccctgacgtgaagtttgtcactgactggagaactcgggtttgtcgtctggttgcgggggcggcagttatgcggtgccgttgggcagtgcacccgtacctttgggagcgcgcgcctcgtcgtgtcgtgacgtcacccgttctgttggcttataatgcagggtggggccacctgccggtaggtgtgcggtaggcttttctccgtcgcaggacgcagggttcgggcctagggtaggctctcctgaatcgacaggcgccggacctctggtgaggggagggataagtgaggcgtcagtttctttggtcggttttatgtacctatcttcttaagtagctgaagctccggttttgaactatgcgctcggggttggcgagtgtgttttgtgaagttttttaggcaccttttgaaatgtaatcatttgggtcaatatgtaattttcagtgttagactagtaaattgtccgctaaattctggccgtttttggcttttttgttagacaggatccccgggtaccggtcgccaccatgggctcttttactatggaccactacctggatattagactgagacctgaccctgagttcccacccgcccagctgatgagcgtgctgttcggcaagctgcaccaggccctggtggcacagggaggcgaccggatcggcgtgagcttccccgacctggatgagagcagatccaggctgggagagcgcctgaggatccacgcatccgccgacgatctgcgcgccctgctggcccggccatggctggagggcctgcgcgaccacctgcagtttggagagccagcagtggtgccacaccctaccccatacaggcaggtgtccagggtgcaggcaaagtctaaccctgagcggctgcggagaaggctgatgcgccggcacgatctgtctgaggaggaggccagaaagaggatccccgacaccgtggccagaacactggatctgcctttcgtgaccctgcggagccagagcacaggccagcacttcagactgtttatcaggcacggcccactgcaggtgacagccgaggaaggaggattcacttgttacggactgtctaaaggaggattcgtgccctggttcagcagcctgaggcctcctaagaagaagaggaaggtttaatgatcataatcaagccatatcacatctgtagaggtttacttgctttaaaaaacctccacacctccccctgaacctgaaacataaaatgaatgcaattgttgttgttaacttgtttattgcagcttataatggttacaaataaagcaatagcatcacaaatttcacaaataaagcatttttttcactgcattctagttgtggtttgtccaaactcatcaatgtatcttatcatgtctggatctgc

SEQ ID NO: 459 - RNA, 255 nt, Artificial Sequence
  Synthetic
ggcccagacugagcacgugaguuuuagagcuagaaauagcaaguuaaaauaaggcuaguccguuaucaacuugaaaaaguggcaccgagucggugcuggaggaagcagggcuuccuuuccucugccaucacuuaucgucgucauccuuguaauccgugcucagucugucuggcggggcucguuggucuagggguaugauucucgcuucgggugcgagaggucccggguucaaaucccggacgagccccgccuuuu

SEQ ID NO: 460 - RNA, 214 nt, Artificial Sequence
  Synthetic
ggaaucccuucugcagcaccguuuuagagcuagaaauagcaaguuaaaauaaggcuaguccguuaucaacuugaaaaaguggcaccgagucggugcggaaaagcgaucaaggugcugcagaagggaucuggcggggcucguuggucuagggguaugauucucgcuucgggugcgagaggucccggguucaaaucccggacgagccccgccuuuu

SEQ ID NO: 461 - RNA, 228 nt, Artificial Sequence
  Synthetic
ggcccagacugagcacgugaguuuuagagcuagaaauagcaaguuaaaauaaggcuaguccguuaucaacuugaaaaagugggaccgagucgguccucugccaucaaagcuucgaccgugcucagucuucugcucgaggcggggcucguuggucuagggguaugauucucgcuucgggugcgagaggucccggguucaaaucccggacgagccccgccucgagcuuuu

SEQ ID NO: 462 - DNA, 187 bp, Artificial Sequence; identical to SEQ ID NO: 287
  Synthetic

SEQ ID NO: 463 - DNA, 198 bp, Artificial Sequence; identical to SEQ ID NO: 288
  Synthetic

SEQ ID NO: 464 - DNA, 198 bp, Artificial Sequence; identical to SEQ ID NO: 289
  Synthetic

SEQ ID NO: 465 - DNA, 198 bp, Artificial Sequence; identical to SEQ ID NO: 290
  Synthetic

SEQ ID NO: 466 - DNA, 198 bp, Artificial Sequence; identical to SEQ ID NO: 291
  Synthetic

SEQ ID NO: 467 - DNA, 198 bp, Artificial Sequence; identical to SEQ ID NO: 292
  Synthetic

SEQ ID NO: 468 - DNA, 198 bp, Artificial Sequence; identical to SEQ ID NO: 293
  Synthetic

SEQ ID NO: 469 - DNA, 198 bp, Artificial Sequence; identical to SEQ ID NO: 294
  Synthetic

SEQ ID NO: 470 - DNA, 177 bp, Artificial Sequence; identical to SEQ ID NO: 295
  Synthetic

SEQ ID NO: 471 - DNA, 188 bp, Artificial Sequence; identical to SEQ ID NO: 296
  Synthetic

SEQ ID NO: 472 - DNA, 188 bp, Artificial Sequence; identical to SEQ ID NO: 297
  Synthetic

SEQ ID NO: 473 - DNA, 188 bp, Artificial Sequence; identical to SEQ ID NO: 298
  Synthetic

SEQ ID NO: 474 - DNA, 188 bp, Artificial Sequence; identical to SEQ ID NO: 299
  Synthetic

SEQ ID NO: 475 - DNA, 188 bp, Artificial Sequence; identical to SEQ ID NO: 300
  Synthetic

SEQ ID NO: 476 - DNA, 188 bp, Artificial Sequence; identical to SEQ ID NO: 301
  Synthetic

SEQ ID NO: 477 - DNA, 188 bp, Artificial Sequence; identical to SEQ ID NO: 302
  Synthetic

SEQ ID NO: 478 - DNA, 192 bp, Artificial Sequence; identical to SEQ ID NO: 303
  Synthetic

SEQ ID NO: 479 - DNA, 203 bp, Artificial Sequence; identical to SEQ ID NO: 304
  Synthetic

SEQ ID NO: 480 - DNA, 203 bp, Artificial Sequence; identical to SEQ ID NO: 305
  Synthetic

SEQ ID NO: 481 - DNA, 203 bp, Artificial Sequence; identical to SEQ ID NO: 306
  Synthetic

SEQ ID NO: 482 - DNA, 203 bp, Artificial Sequence; identical to SEQ ID NO: 307
  Synthetic

SEQ ID NO: 483 - DNA, 203 bp, Artificial Sequence; identical to SEQ ID NO: 308
  Synthetic

SEQ ID NO: 484 - DNA, 203 bp, Artificial Sequence; identical to SEQ ID NO: 309
  Synthetic

SEQ ID NO: 485 - DNA, 203 bp, Artificial Sequence; identical to SEQ ID NO: 310
  Synthetic

SEQ ID NO: 486 - DNA, 28 bp, Artificial Sequence
  Synthetic
  misc_feature (5)..(28): n is a, c, g, or t
gtgcnnnnnnnnnnnnnnnnnnnnnnnn

SEQ ID NO: 487 - DNA, 28 bp, Artificial Sequence
  Synthetic
  misc_feature (5)..(28): n is a, c, g, or t
aaaannnnnnnnnnnnnnnnnnnnnnnn

SEQ ID NO: 488 - DNA, 28 bp, Artificial Sequence
  Synthetic
  misc_feature (5)..(28): n is a, c, g, or t
cgcgnnnnnnnnnnnnnnnnnnnnnnnn

SEQ ID NO: 489 - DNA, 31 bp, Artificial Sequence
  Synthetic
  misc_feature (8)..(31): n is a, c, g, or t
ctgagggnnnnnnnnnnnnnnnnnnnnnnnn

SEQ ID NO: 490 - DNA, 20 bp, Artificial Sequence
  Synthetic
ggcccagactgagcacgtga

SEQ ID NO: 491 - DNA, 46 bp, Artificial Sequence
  Synthetic
gttttagagctagaaatagcaagttaaaataaggctagtccgttat

SEQ ID NO: 492 - DNA, 30 bp, Artificial Sequence
  Synthetic
caacttgaaaaagtggcaccgagtcggtgc

SEQ ID NO: 493 - DNA, 41 bp, Artificial Sequence
  Synthetic
tggaggaagcagggcttcctttcctctgccatcacttatcg

SEQ ID NO: 494 - DNA, 17 bp, Artificial Sequence
  Synthetic
tcgtcatccttgtaatc

SEQ ID NO: 495 - DNA, 13 bp, Artificial Sequence
  Synthetic
cgtgctcagtctg

SEQ ID NO: 496 - DNA, 23 bp, Artificial Sequence
  Synthetic
gtctgataggcagcctgcactgg

SEQ ID NO: 497 - DNA, 21 bp, Artificial Sequence
  Synthetic
gccgcgcgcgcgaaaaagccg

SEQ ID NO: 498 - DNA, 20 bp, Artificial Sequence
  Synthetic
gattcctggtgccagaaaca

SEQ ID NO: 499 - DNA, 20 bp, Artificial Sequence
  Synthetic
gtcatcttagtcattacctg

SEQ ID NO: 500 - DNA, 20 bp, Artificial Sequence
  Synthetic
gcattttcaggaggaagcga

SEQ ID NO: 501 - DNA, 20 bp, Artificial Sequence
  Synthetic
gatgtctgcaggccagatga

SEQ ID NO: 502 - DNA, 20 bp, Artificial Sequence
  Synthetic
ggccgacagtcacctcctga

SEQ ID NO: 503 - DNA, 20 bp, Artificial Sequence
  Synthetic
gcagtggtggggggccttgg

SEQ ID NO: 504 - DNA, 21 bp, Artificial Sequence
  Synthetic
gatccttccagtcagggccat

SEQ ID NO: 505 - DNA, 21 bp, Artificial Sequence
  Synthetic
gcaaagtgagagccaagggct

SEQ ID NO: 506 - DNA, 20 bp, Artificial Sequence
  Synthetic
ggagatctctgaagtgaaga

SEQ ID NO: 507 - DNA, 21 bp, Artificial Sequence
  Synthetic
gctgggagagggagcccctcc

SEQ ID NO: 508 - DNA, 21 bp, Artificial Sequence
  Synthetic
gcagccgttgccatctgctgc

SEQ ID NO: 509 - DNA, 21 bp, Artificial Sequence
  Synthetic
gcacgggccagtgagtcctcc

SEQ ID NO: 510 - DNA, 21 bp, Artificial Sequence
  Synthetic
gctctatgaaccgtacctgct

SEQ ID NO: 511 - DNA, 21 bp, Artificial Sequence
  Synthetic
gccctccactagggcaagggt

SEQ ID NO: 512 - DNA, 20 bp, Artificial Sequence
  Synthetic
gtacggtctcctgcacagat

SEQ ID NO: 513 - DNA, 21 bp, Artificial Sequence
  Synthetic
gtgactgcaggaagctctgga

SEQ ID NO: 514 - DNA, 21 bp, Artificial Sequence
  Synthetic
gtgtggctctgtacctgtggc

SEQ ID NO: 515 - DNA, 21 bp, Artificial Sequence
  Synthetic
gaattggggatgccaaggagt

SEQ ID NO: 516 - DNA, 21 bp, Artificial Sequence
  Synthetic
gtctttattgggaatatttga

SEQ ID NO: 517 - DNA, 21 bp, Artificial Sequence
  Synthetic
gatctatacaaagtctttgag

SEQ ID NO: 518 - DNA, 20 bp, Artificial Sequence
  Synthetic
gaccagtgattctgttctca

SEQ ID NO: 519 - DNA, 21 bp, Artificial Sequence
  Synthetic
gattaccttcattccattact

SEQ ID NO: 520 - DNA, 20 bp, Artificial Sequence
  Synthetic
gacactggaaggactctcag

SEQ ID NO: 521 - DNA, 21 bp, Artificial Sequence
  Synthetic
gtaaattgctgactttgatta

SEQ ID NO: 522 - DNA, 20 bp, Artificial Sequence
  Synthetic
ggcgaagtgctaaaagggaa

SEQ ID NO: 523 - DNA, 21 bp, Artificial Sequence
  Synthetic
gattattccatacagtgacta

SEQ ID NO: 524 - DNA, 21 bp, Artificial Sequence
  Synthetic
gttgcacatttatctgtctct

SEQ ID NO: 525 - DNA, 21 bp, Artificial Sequence
  Synthetic
gtgtttcccaaacaacagcac

SEQ ID NO: 526 - DNA, 20 bp, Artificial Sequence
  Synthetic
gggcctctgcagaacactag

SEQ ID NO: 527 - DNA, 21 bp, Artificial Sequence
  Synthetic
gctggacatgaatgactgagc

SEQ ID NO: 528 - DNA, 21 bp, Artificial Sequence
  Synthetic
gtagtcacccaccaaagctca

SEQ ID NO: 529 - DNA, 20 bp, Artificial Sequence
  Synthetic
ggaatcccttctgcagcacc

SEQ ID NO: 530 - DNA, 20 bp, Artificial Sequence
  Synthetic
gagtccgagcagaagaagaa

SEQ ID NO: 531 - RNA, 20 nt, Artificial Sequence
  Synthetic
ggcccagacugagcacguga

SEQ ID NO: 532 - RNA, 20 nt, Artificial Sequence
  Synthetic
gucaucuuagucauuaccug

SEQ ID NO: 533 - RNA, 20 nt, Artificial Sequence
  Synthetic
gauuccuggugccagaaaca

SEQ ID NO: 534 - RNA, 20 nt, Artificial Sequence
  Synthetic
gcauuuucaggaggaagcga

SEQ ID NO: 535 - RNA, 20 nt, Artificial Sequence
  Synthetic
gaguccgagcagaagaagaa

SEQ ID NO: 536 - DNA, 21 bp, Artificial Sequence
  Synthetic
gcccttcagctaaaataaagg

SEQ ID NO: 537 - DNA, 20 bp, Artificial Sequence
  Synthetic
gacatcgatgtcctccccat

SEQ ID NO: 538 - DNA, 20 bp, Artificial Sequence
  Synthetic
ggggtcccaggtgctgacgt

SEQ ID NO: 539 - DNA, 20 bp, Artificial Sequence
  Synthetic
gtcaaccagtatcccggtgc

SEQ ID NO: 540 - DNA, 21 bp, Artificial Sequence
  Synthetic
gtacctgaaccgtatatctta

SEQ ID NO: 541 - DNA, 20 bp, Artificial Sequence
  Synthetic
gcatgttttcacgatagtaa

SEQ ID NO: 542 - DNA, 21 bp, Artificial Sequence
  Synthetic
gtcaaccattaagcaaaacat

SEQ ID NO: 543 - DNA, 21 bp, Artificial Sequence
  Synthetic
gatgaagcactgtgggtacga

SEQ ID NO: 544 - DNA, 20 bp, Artificial Sequence
  Synthetic
gagcccagggctgggcacag

SEQ ID NO: 545 - DNA, 76 bp, Artificial Sequence
  Synthetic
gttttagagctagaaatagcaagttaaaataaggctagtccgttatcaacttgaaaaagtggcaccgagtcggtgc

SEQ ID NO: 546 - DNA, 84 bp, Artificial Sequence
  Synthetic
gttttagtactctgtaatgaaaattacagaatctactaaaacaaggcaaaatgccgtgtttatctcgtcaacttgttggcgaga

SEQ ID NO: 547 - RNA, 76 nt, Artificial Sequence
  Synthetic
guuuuagagcuagaaauagcaaguuaaaauaaggcuaguccguuaucaacuugaaaaaguggcaccgagucggugc

SEQ ID NO: 548 - DNA, 10 bp, Artificial Sequence
  Synthetic
tctgccatct

SEQ ID NO: 549 - DNA, 15 bp, Artificial Sequence
  Synthetic
tggtgcggtgaattc

SEQ ID NO: 550 - DNA, 22 bp, Artificial Sequence
  Synthetic
tctgccctcccgtcacccctgt

SEQ ID NO: 551 - DNA, 34 bp, Artificial Sequence
  Synthetic
tggaggaagcagggcttcctttcctctgccatca

SEQ ID NO: 552 - DNA, 22 bp, Artificial Sequence
  Synthetic
tgagttacaacgaacacctcag

SEQ ID NO: 553 - DNA, 15 bp, Artificial Sequence
  Synthetic
tgtctgaagccatcc

SEQ ID NO: 554 - DNA, 22 bp, Artificial Sequence
  Synthetic
aatgtgccatctggagcactca

SEQ ID NO: 555 - DNA, 14 bp, Artificial Sequence
  Synthetic
ttcctctgccatct

SEQ ID NO: 556 - DNA, 24 bp, Artificial Sequence
  Synthetic
agggcttcctttcctctgccatct

SEQ ID NO: 557 - DNA, 34 bp, Artificial Sequence
  Synthetic
tggaggaagcagggcttcctttcctctgccatct

SEQ ID NO: 558 - DNA, 11 bp, Artificial Sequence
  Synthetic
gtcaccactgt

SEQ ID NO: 559 - DNA, 22 bp, Artificial Sequence
  Synthetic
tctgccctcccgtcaccactgt

SEQ ID NO: 560 - DNA, 31 bp, Artificial Sequence
  Synthetic
aggactagttctgccctcccgtcaccactgt

SEQ ID NO: 561 - DNA, 15 bp, Artificial Sequence
  Synthetic
atgactcaaatatgc

SEQ ID NO: 562 - DNA, 25 bp, Artificial Sequence
  Synthetic
tacgaaggaaatgactcaaatatgc

SEQ ID NO: 563 - DNA, 35 bp, Artificial Sequence
  Synthetic
gcactgtgggtacgaaggaaatgactcaaatatgc

SEQ ID NO: 564 - DNA, 31 bp, Artificial Sequence
  Synthetic
aggaggaagctgctaaggactagttctgccc

SEQ ID NO: 565 - DNA, 14 bp, Artificial Sequence
  Synthetic
aacgaacacctcat

SEQ ID NO: 566 - DNA, 34 bp, Artificial Sequence
  Synthetic
tcctgcgacgccctctggaggaagcagggcttcc

SEQ ID NO: 567 - DNA, 35 bp, Artificial Sequence
  Synthetic
taagcaaaacatgggaactcagtttatatgagtta

SEQ ID NO: 568 - DNA, 12 bp, Artificial Sequence
  Synthetic
atgtagacgcca

SEQ ID NO: 569 - DNA, 23 bp, Artificial Sequence
  Synthetic
gtacctgaaccgtatatcttatg

SEQ ID NO: 570 - DNA, 27 bp, Artificial Sequence
  Synthetic
gccctatgctctagcttccatccaagc

SEQ ID NO: 571 - DNA, 18 bp, Artificial Sequence
  Synthetic
ggaattctgtatccatct

SEQ ID NO: 572 - DNA, 17 bp, Artificial Sequence
  Synthetic
ttctgctctcaccggga

SEQ ID NO: 573 - DNA, 13 bp, Artificial Sequence
  Synthetic
gccggctccgtca

SEQ ID NO: 574 - DNA, 21 bp, Artificial Sequence
  Synthetic
ggcgaagctttgagacctgga

SEQ ID NO: 575 - DNA, 15 bp, Artificial Sequence
  Synthetic
tggatggcactgagc

SEQ ID NO: 576 - DNA, 14 bp, Artificial Sequence
  Synthetic
gctacctgcccacc

SEQ ID NO: 577 - DNA, 15 bp, Artificial Sequence
  Synthetic
gtcttctatctgatc

SEQ ID NO: 578 - DNA, 15 bp, Artificial Sequence
  Synthetic
gctccgagtccatcc

SEQ ID NO: 579 - DNA, 25 bp, Artificial Sequence
  Synthetic
accccagatcccccacagccactac

SEQ ID NO: 580 - DNA, 25 bp, Artificial Sequence
  Synthetic
gcaatttgcatcaattcaccaccta

SEQ ID NO: 581 - DNA, 24 bp, Artificial Sequence
  Synthetic
tataaaaagtatttgtttgtttta

SEQ ID NO: 582 - DNA, 24 bp, Artificial Sequence
  Synthetic
acagtgcataaataaccatattta

SEQ ID NO: 583 - DNA, 24 bp, Artificial Sequence
  Synthetic
tccatgcctccctgtgagccacca

SEQ ID NO: 584 - DNA, 24 bp, Artificial Sequence
  Synthetic
atttcacgaataaaagttactacg

SEQ ID NO: 585 - DNA, 25 bp, Artificial Sequence
  Synthetic
gctgcctgctgccaccagcatcctc

SEQ ID NO: 586 - DNA, 24 bp, Artificial Sequence
  Synthetic
aaagcttccaatgtagtcagtcta

SEQ ID NO: 587 - DNA, 24 bp, Artificial Sequence
  Synthetic
aaagttattaattacatttgttca

SEQ ID NO: 588 - DNA, 24 bp, Artificial Sequence
  Synthetic
aacctgggtgtcatttctcagaac

SEQ ID NO: 589 - DNA, 25 bp, Artificial Sequence
  Synthetic
tcttcttgcagcctatggaaattcc

SEQ ID NO: 590 - DNA, 25 bp, Artificial Sequence
  Synthetic
tgccacattacagggtgatcagaca

SEQ ID NO: 591 - DNA, 24 bp, Artificial Sequence
  Synthetic
tcacagatcctgcggcaaccgcta

SEQ ID NO: 592 - DNA, 24 bp, Artificial Sequence
  Synthetic
gtggacaaggggcgatgagcctgc

SEQ ID NO: 593 - DNA, 24 bp, Artificial Sequence
  Synthetic
ggttcaagctctggaggccagccc

SEQ ID NO: 594 - DNA, 11 bp, Artificial Sequence
  Synthetic
tagttctgccc

SEQ ID NO: 595 - DNA, 21 bp, Artificial Sequence
  Synthetic
tgctaaggactagttctgccc

SEQ ID NO: 596 - DNA, 14 bp, Artificial Sequence
  Synthetic
gaagcagggcttcc

SEQ ID NO: 597 - DNA, 25 bp, Artificial Sequence
  Synthetic
gccctctggaggaagcagggcttcc

SEQ ID NO: 598 - DNA, 15 bp, Artificial Sequence
  Synthetic
tgtctgaagcaatcg

SEQ ID NO: 599 - DNA, 25 bp, Artificial Sequence
  Synthetic
tcaaatatgctgtctgaagcaatcg

SEQ ID NO: 600 - DNA, 35 bp, Artificial Sequence
  Synthetic
aggaaatgactcaaatatgctgtctgaagcaatcg

SEQ ID NO: 601 - DNA, 15 bp, Artificial Sequence
  Synthetic
agtttatatgagtta

SEQ ID NO: 602 - DNA, 25 bp, Artificial Sequence
  Synthetic
atgggaactcagtttatatgagtta

SEQ ID NO: 603 - DNA, 24 bp, Artificial Sequence
  Synthetic
tatgagttacaacgaacacctcat

SEQ ID NO: 604 - DNA, 34 bp, Artificial Sequence
  Synthetic
actcagtttatatgagttacaacgaacacctcat

SEQ ID NO: 605 - DNA, 17 bp, Artificial Sequence
  Synthetic
ggaaaagcgatcaaggt

SEQ ID NO: 606 - DNA, 28 bp, Artificial Sequence
  Synthetic
gccagaagctcggaaaagcgatcaaggt

SEQ ID NO: 607 - DNA, 38 bp, Artificial Sequence
  Synthetic
gcttgagaccgccagaagctcggaaaagcgatcaaggt

SEQ ID NO: 608 - DNA, 17 bp, Artificial Sequence
  Synthetic
gaccgccagaagctcgg

SEQ ID NO: 609 - DNA, 27 bp, Artificial Sequence
  Synthetic
tagtgcttgagaccgccagaagctcgg

SEQ ID NO: 610 - DNA, 36 bp, Artificial Sequence
  Synthetic
tgacgtaggtagtgcttgagaccgccagaagctcgg

SEQ ID NO: 611 - DNA, 16 bp, Artificial Sequence
  Synthetic
gtgatgggagcacttc

SEQ ID NO: 612 - DNA, 26 bp, Artificial Sequence
  Synthetic
accggttgatgtgatgggagcacttc

SEQ ID NO: 613 - DNA, 36 bp, Artificial Sequence
  Synthetic
gcaatgcgccaccggttgatgtgatgggagcacttc

SEQ ID NO: 614 - DNA, 16 bp, Artificial Sequence
  Synthetic
gcgccaccggttgatg

SEQ ID NO: 615 - DNA, 36 bp, Artificial Sequence
  Synthetic
ttggcctgcttcgtggcaatgcgccaccggttgatg

SEQ ID NO: 616 - DNA, 22 bp, Artificial Sequence
  Synthetic
gtgtgtccctctgacaatgtgc

SEQ ID NO: 617 - RNA, 14 nt, Artificial Sequence
  Synthetic
uuccucugccaucu

SEQ ID NO: 618 - RNA, 14 nt, Artificial Sequence
  Synthetic
gaagcagggcuucc

SEQ ID NO: 619 - RNA, 14 nt, Artificial Sequence
  Synthetic
aacgaacaccucau

SEQ ID NO: 620 - RNA, 25 nt, Artificial Sequence
  Synthetic
augggaacucaguuuauaugaguua

SEQ ID NO: 621 - RNA, 21 nt, Artificial Sequence
  Synthetic
ugcuaaggacuaguucugccc

SEQ ID NO: 622 - RNA, 15 nt, Artificial Sequence
  Synthetic
ugucugaagcaaucg

SEQ ID NO: 623 - RNA, 16 nt, Artificial Sequence
  Synthetic
gugaugggagcacuuc

SEQ ID NO: 624 - DNA, 24 bp, Artificial Sequence
  Synthetic
cttatcgtcgtcatccttgtaatc

SEQ ID NO: 625 - DNA, 24 bp, Artificial Sequence
  Synthetic
gattacaaggatgacgacgataag

SEQ ID NO: 626 - DNA, 27 bp, Artificial Sequence
  Synthetic
ggtcttatcgtcgtcatccttgtaatc

SEQ ID NO: 627 - DNA, 30 bp, Artificial Sequence
  Synthetic
tcagggcttatcgtcgtcatccttgtaatc

SEQ ID NO: 628 - DNA, 103 bp, Artificial Sequence
  Synthetic
gcccttcagctaaaataaagggttttagagctagaaatagcaagttaaaataaggctagtccgttatcaacttgaaaaagtggcaccgagtcggtgctttttt

SEQ ID NO: 629 - DNA, 102 bp, Artificial Sequence
  Synthetic
gacatcgatgtcctccccatgttttagagctagaaatagcaagttaaaataaggctagtccgttatcaacttgaaaaagtggcaccgagtcggtgctttttt

SEQ ID NO: 630 - DNA, 102 bp, Artificial Sequence
  Synthetic
ggggtcccaggtgctgacgtgttttagagctagaaatagcaagttaaaataaggctagtccgttatcaacttgaaaaagtggcaccgagtcggtgctttttt

SEQ ID NO: 631 - DNA, 102 bp, Artificial Sequence
  Synthetic
gtcaaccagtatcccggtgcgttttagagctagaaatagcaagttaaaataaggctagtccgttatcaacttgaaaaagtggcaccgagtcggtgctttttt

SEQ ID NO: 632 - DNA, 103 bp, Artificial Sequence
  Synthetic
gtacctgaaccgtatatcttagttttagagctagaaatagcaagttaaaataaggctagtccgttatcaacttgaaaaagtggcaccgagtcggtgctttttt

SEQ ID NO: 633 - DNA, 102 bp, Artificial Sequence
  Synthetic
gcatgttttcacgatagtaagttttagagctagaaatagcaagttaaaataaggctagtccgttatcaacttgaaaaagtggcaccgagtcggtgctttttt

SEQ ID NO: 634 - DNA, 103 bp, Artificial Sequence
  Synthetic
gtcaaccattaagcaaaacatgttttagagctagaaatagcaagttaaaataaggctagtccgttatcaacttgaaaaagtggcaccgagtcggtgctttttt

SEQ ID NO: 635 - DNA, 103 bp, Artificial Sequence
  Synthetic
gatgaagcactgtgggtacgagttttagagctagaaatagcaagttaaaataaggctagtccgttatcaacttgaaaaagtggcaccgagtcggtgctttttt

SEQ ID NO: 636 - DNA, 102 bp, Artificial Sequence
  Synthetic
gagcccagggctgggcacaggttttagagctagaaatagcaagttaaaataaggctagtccgttatcaacttgaaaaagtggcaccgagtcggtgctttttt

SEQ ID NO: 637 - DNA, 14 bp, Artificial Sequence
  Synthetic
ttctggcaccagga

SEQ ID NO: 638 - DNA, 15 bp, Artificial Sequence
  Synthetic
gtaatgactaagatg

SEQ ID NO: 639 - DNA, 15 bp, Artificial Sequence
  Synthetic
cttcctcctgaaaat

SEQ ID NO: 640 - DNA, 13 bp, Artificial Sequence
  Synthetic
tctggcctgcaga

SEQ ID NO: 641 - DNA, 12 bp, Artificial Sequence
  Synthetic
aggccccccacc

SEQ ID NO: 642 - DNA, 9 bp, Artificial Sequence
  Synthetic
gccctgact

SEQ ID NO: 643 - DNA, 13 bp, Artificial Sequence
  Synthetic
ccttggctctcac

SEQ ID NO: 644 - DNA, 13 bp, Artificial Sequence
  Synthetic
tcacttcagagat

SEQ ID NO: 645 - DNA, 13 bp, Artificial Sequence
  Synthetic
ggggctccctctc

SEQ ID NO: 646 - DNA, 13 bp, Artificial Sequence
  Synthetic
gcagatggcaacg

SEQ ID NO: 647 - DNA, 13 bp, Artificial Sequence
  Synthetic
ggactcactggcc

SEQ ID NO: 648 - DNA, 13 bp, Artificial Sequence
  Synthetic
aggtacggttcat

SEQ ID NO: 649 - DNA, 13 bp, Artificial Sequence
  Synthetic
cttgccctagtgg

SEQ ID NO: 650 - DNA, 13 bp, Artificial Sequence
  Synthetic
tgtgcaggagacc

SEQ ID NO: 651 - DNA, 13 bp, Artificial Sequence
  Synthetic
agagcttcctgca

SEQ ID NO: 652 - DNA, 15 bp, Artificial Sequence
  Synthetic
tgactgcagccagca

SEQ ID NO: 653 - DNA, 13 bp, Artificial Sequence
  Synthetic
gaaaataccatcg

SEQ ID NO: 654 - DNA, 9 bp, Artificial Sequence
  Synthetic
acacctttc

SEQ ID NO: 655 - DNA, 14 bp, Artificial Sequence
  Synthetic
tgaaaaatcccaga

SEQ ID NO: 656 - DNA, 11 bp, Artificial Sequence
  Synthetic
taattccttga

SEQ ID NO: 657 - DNA, 9 bp, Artificial Sequence
  Synthetic
tcggcgttc

SEQ ID NO: 658 - DNA, 9 bp, Artificial Sequence
  Synthetic
tgaccctag

SEQ ID NO: 659 - DNA, 9 bp, Artificial Sequence
  Synthetic
tgacttgtg

SEQ ID NO: 660 - DNA, 13 bp, Artificial Sequence
  Synthetic
gctgcagaaggga

SEQ ID NO: 661 - DNA, 14 bp, Artificial Sequence
  Synthetic
ttcttctgctcgga

SEQ ID NO: 662 - RNA, 13 nt, Artificial Sequence
  Synthetic
cgugcucagucug

SEQ ID NO: 663 - RNA, 15 nt, Artificial Sequence
  Synthetic
guaaugacuaagaug

SEQ ID NO: 664 - RNA, 14 nt, Artificial Sequence
  Synthetic
uucuggcaccagga

SEQ ID NO: 665 - RNA, 15 nt, Artificial Sequence
  Synthetic
cuuccuccugaaaau

SEQ ID NO: 666 - RNA, 14 nt, Artificial Sequence
  Synthetic
uucuucugcucgga

SEQ ID NO: 667 - DNA, 14 bp, Artificial Sequence
  Synthetic
acaggtacagagcc

SEQ ID NO: 668 - DNA, 14 bp, Artificial Sequence
  Synthetic
ccttggcatcccca

SEQ ID NO: 669 - DNA, 14 bp, Artificial Sequence
  Synthetic
aatattcccaataa

SEQ ID NO: 670 - DNA, 14 bp, Artificial Sequence
  Synthetic
aaagactttgtata

SEQ ID NO: 671 - DNA, 14 bp, Artificial Sequence
  Synthetic
gaacagaatcactg

SEQ ID NO: 672 - DNA, 14 bp, Artificial Sequence
  Synthetic
aatggaatgaaggt

SEQ ID NO: 673 - DNA, 14 bp, Artificial Sequence
  Synthetic
agagtccttccagt

SEQ ID NO: 674 - DNA, 14 bp, Artificial Sequence
  Synthetic
tcaaagtcagcaat

SEQ ID NO: 675 - DNA, 14 bp, Artificial Sequence
  Synthetic
ccttttagcacttc

SEQ ID NO: 676 - DNA, 14 bp, Artificial Sequence
  Synthetic
tcactgtatggaat

SEQ ID NO: 677 - DNA, 14 bp, Artificial Sequence
  Synthetic
gacagataaatgtg

SEQ ID NO: 678 - DNA, 14 bp, Artificial Sequence
  Synthetic
ctgttgtttgggaa

SEQ ID NO: 679 - DNA, 14 bp, Artificial Sequence
  Synthetic
gtgttctgcagagg

SEQ ID NO: 680 - DNA, 14 bp, Artificial Sequence
  Synthetic
cagtcattcatgtc

SEQ ID NO: 681 - DNA, 14 bp, Artificial Sequence
  Synthetic
gctttggtgggtga

SEQ ID NO: 682 - DNA, 13 bp, Artificial Sequence
  Synthetic
tggtggtggtggt

SEQ ID NO: 683 - DNA, 34 bp, Artificial Sequence
  Synthetic
gcgatgccgtatgccgaaaggcatacggcatcgc

SEQ ID NO: 684 - RNA, 37 nt, Artificial Sequence
  Synthetic
cgcgguucuaucuaguuacgcguuaaaccaacuagaa

SEQ ID NO: 685 - DNA, 125 bp, Artificial Sequence
  Synthetic
ggcccagactgagcacgtgagttttagagctagaaatagcaagttaaaataaggctagtccgttatcaacttgaaaaagtggcaccgagtcggtgctctgccatctcgtgctcagtctgtttttt

SEQ ID NO: 686 - DNA, 136 bp, Artificial Sequence
  Synthetic
gtctgataggcagcctgcactgggttttagtactctgtaatgaaaattacagaatctactaaaacaaggcaaaatgccgtgtttatctcgtcaacttgttggcgagatggtgcggtgaattcgcctgcactttttt

SEQ ID NO: 687 - DNA, 103 bp, Artificial Sequence
  Synthetic
gccgcgcgcgcgaaaaagccggttttagagctagaaatagcaagttaaaataaggctagtccgttatcaacttgaaaaagtggcaccgagtcggtgctttttt

SEQ ID NO: 688 - DNA, 113 bp, Artificial Sequence
  Synthetic
gccgcgcgcgcgaaaaagccggttttagagctagaaatagcaagttaaaataaggctagtccgttatcaacttgaaaaagtggcaccgagtcggtgctctgccatcttttttt

SEQ ID NO: 689 - DNA, 112 bp, Artificial Sequence
  Synthetic
ggcccagactgagcacgtgagttttagagctagaaatagcaagttaaaataaggctagtccgttatcaacttgaaaaagtggcaccgagtcggtgctctgccatcttttttt

SEQ ID NO: 690 - DNA, 102 bp, Artificial Sequence
  Synthetic
ggcccagactgagcacgtgagttttagagctagaaatagcaagttaaaataaggctagtccgttatcaacttgaaaaagtggcaccgagtcggtgctttttt

SEQ ID NO: 691 - DNA, 162 bp, Artificial Sequence
  Synthetic
gattcctggtgccagaaacagttttagagctagaaatagcaagttaaaataaggctagtccgttatcaacttgaaaaagtggcaccgagtcggtgctctgccctcccgtcacccctgtcttatcgtcgtcatccttgtaatcttctggcaccaggatttttt

SEQ ID NO: 692 - DNA, 170 bp, Artificial Sequence
  Synthetic
gattcctggtgccagaaacagttttagagctagaaatagcaagttaaaataaggctagtccgttatcaacttgaaaaagtggcaccgagtcggtgctctgccctcccgtcacccctgtcttatcgtcgtcatccttgtaatcttctggcaccaggacctcttcttttttt

SEQ ID NO: 693 - DNA, 226 bp, Artificial Sequence
  Synthetic
gattcctggtgccagaaacagttttagagctagaaatagcaagttaaaataaggctagtccgttatcaacttgaaaaagtggcaccgagtcggtgctctgccctcccgtcacccctgtcttatcgtcgtcatccttgtaatcttctggcaccaggacctcttctgggtcaggagccccccccctgaacccaggataaccctcaaagtcggggggcaaccctttttt

SEQ ID NO: 694 - DNA, 173 bp, Artificial Sequence
  Synthetic
ggcccagactgagcacgtgagttttagagctagaaatagcaagttaaaataaggctagtccgttatcaacttgaaaaagtggcaccgagtcggtgctggaggaagcagggcttcctttcctctgccatcacttatcgtcgtcatccttgtaatccgtgctcagtctgtttttt

SEQ ID NO: 695 - DNA, 181 bp, Artificial Sequence
  Synthetic
ggcccagactgagcacgtgagttttagagctagaaatagcaagttaaaataaggctagtccgttatcaacttgaaaaagtggcaccgagtcggtgctggaggaagcagggcttcctttcctctgccatcacttatcgtcgtcatccttgtaatccgtgctcagtctgtctctctctttttt

SEQ ID NO: 696 - DNA, 223 bp, Artificial Sequence
  Synthetic
ggcccagactgagcacgtgagttttagagctagaaatagcaagttaaaataaggctagtccgttatcaacttgaaaaagtggcaccgagtcggtgctggaggaagcagggcttcctttcctctgccatcacttatcgtcgtcatccttgtaatccgtgctcagtctgtctctctcttgacgcggttctatctagttacgcgttaaaccaactagaaatttttt

SEQ ID NO: 697 - DNA, 237 bp, Artificial Sequence
  Synthetic
ggcccagactgagcacgtgagttttagagctagaaatagcaagttaaaataaggctagtccgttatcaacttgaaaaagtggcaccgagtcggtgctggaggaagcagggcttcctttcctctgccatcacttatcgtcgtcatccttgtaatccgtgctcagtctgtctctctcgggtcaggagccccccccctgaacccaggataaccctcaaagtcggggggcaaccctttttt

SEQ ID NO: 698 - DNA, 163 bp, Artificial Sequence
  Synthetic
gtcatcttagtcattacctggttttagagctagaaatagcaagttaaaataaggctagtccgttatcaacttgaaaaagtggcaccgagtcggtgctgagttacaacgaacacctcagcttatcgtcgtcatccttgtaatcgtaatgactaagatgtttttt

SEQ ID NO: 699 - DNA, 171 bp, Artificial Sequence
  Synthetic
gtcatcttagtcattacctggttttagagctagaaatagcaagttaaaataaggctagtccgttatcaacttgaaaaagtggcaccgagtcggtgctgagttacaacgaacacctcagcttatcgtcgtcatccttgtaatcgtaatgactaagatgtcatctcttttttt

SEQ ID NO: 700 - DNA, 227 bp, Artificial Sequence
  Synthetic
gtcatcttagtcattacctggttttagagctagaaatagcaagttaaaataaggctagtccgttatcaacttgaaaaagtggcaccgagtcggtgctgagttacaacgaacacctcagcttatcgtcgtcatccttgtaatcgtaatgactaagatgtcatctctgggtcaggagccccccccctgaacccaggataaccctcaaagtcggggggcaaccctttttt

SEQ ID NO: 701 - DNA, 156 bp, Artificial Sequence
  Synthetic
gcattttcaggaggaagcgagttttagagctagaaatagcaagttaaaataaggctagtccgttatcaacttgaaaaagtggcaccgagtcggtgctgtctgaagccatcccttatcgtcgtcatccttgtaatccttcctcctgaaaattttttt

SEQ ID NO: 702 - DNA, 164 bp, Artificial Sequence
  Synthetic
gcattttcaggaggaagcgagttttagagctagaaatagcaagttaaaataaggctagtccgttatcaacttgaaaaagtggcaccgagtcggtgctgtctgaagccatcccttatcgtcgtcatccttgtaatccttcctcctgaaaataactctcttttttt

SEQ ID NO: 703 - DNA, 220 bp, Artificial Sequence
  Synthetic
gcattttcaggaggaagcgagttttagagctagaaatagcaagttaaaataaggctagtccgttatcaacttgaaaaagtggcaccgagtcggtgctgtctgaagccatcccttatcgtcgtcatccttgtaatccttcctcctgaaaataactctctgggtcaggagccccccccctgaacccaggataaccctcaaagtcggggggcaaccctttttt

SEQ ID NO: 704 - DNA, 161 bp, Artificial Sequence
  Synthetic
gatgtctgcaggccagatgagttttagagctagaaatagcaagttaaaataaggctagtccgttatcaacttgaaaaagtggcaccgagtcggtgcaatgtgccatctggagcactcacttatcgtcgtcatccttgtaatctctggcctgcagatttttt

SEQ ID NO: 705 - DNA, 169 bp, Artificial Sequence
  Synthetic
gatgtctgcaggccagatgagttttagagctagaaatagcaagttaaaataaggctagtccgttatcaacttgaaaaagtggcaccgagtcggtgcaatgtgccatctggagcactcacttatcgtcgtcatccttgtaatctctggcctgcagaacaatctctttttt

SEQ ID NO: 706 - DNA, 229 bp, Artificial Sequence
  Synthetic
gatgtctgcaggccagatgagttttagagctagaaatagcaagttaaaataaggctagtccgttatcaacttgaaaaagtggcaccgagtcggtgcaatgtgccatctggagcactcacttatcgtcgtcatccttgtaatctctggcctgcagaacaatctcgtcagggtcaggagccccccccctgcacccaggaaaaccctcaaagtcggggggcaaccctttttt

SEQ ID NO: 707 - DNA, 129 bp, Artificial Sequence
  Synthetic
ggcccagactgagcacgtgagttttagagctagaaatagcaagttaaaataaggctagtccgttatcaacttgaaaaagtggcaccgagtcggtgcttcctctgccatctcgtgctcagtctgtttttt

SEQ ID NO: 708 - DNA, 139 bp, Artificial Sequence
  Synthetic
ggcccagactgagcacgtgagttttagagctagaaatagcaagttaaaataaggctagtccgttatcaacttgaaaaagtggcaccgagtcggtgcagggcttcctttcctctgccatctcgtgctcagtctgtttttt

SEQ ID NO: 709 - DNA, 149 bp, Artificial Sequence
  Synthetic
ggcccagactgagcacgtgagttttagagctagaaatagcaagttaaaataaggctagtccgttatcaacttgaaaaagtggcaccgagtcggtgctggaggaagcagggcttcctttcctctgccatctcgtgctcagtctgtttttt

SEQ ID NO: 710 - DNA, 137 bp, Artificial Sequence
  Synthetic
ggcccagactgagcacgtgagttttagagctagaaatagcaagttaaaataaggctagtccgttatcaacttgaaaaagtggcaccgagtcggtgcttcctctgccatctcgtgctcagtctgtctctctctttttt

SEQ ID NO: 711 - DNA, 147 bp, Artificial Sequence
  Synthetic
ggcccagactgagcacgtgagttttagagctagaaatagcaagttaaaataaggctagtccgttatcaacttgaaaaagtggcaccgagtcggtgcagggcttcctttcctctgccatctcgtgctcagtctgtctctctctttttt

SEQ ID NO: 712 - DNA, 157 bp, Artificial Sequence
  Synthetic
ggcccagactgagcacgtgagttttagagctagaaatagcaagttaaaataaggctagtccgttatcaacttgaaaaagtggcaccgagtcggtgctggaggaagcagggcttcctttcctctgccatctcgtgctcagtctgtctctctctttttt

SEQ ID NO: 713 - DNA, 179 bp, Artificial Sequence
  Synthetic
ggcccagactgagcacgtgagttttagagctagaaatagcaagttaaaataaggctagtccgttatcaacttgaaaaagtggcaccgagtcggtgcttcctctgccatctcgtgctcagtctgtctctctcttgacgcggttctatctagttacgcgttaaaccaactagaaatttttt

SEQ ID NO: 714 - DNA, 189 bp, Artificial Sequence
  Synthetic
ggcccagactgagcacgtgagttttagagctagaaatagcaagttaaaataaggctagtccgttatcaacttgaaaaagtggcaccgagtcggtgcagggcttcctttcctctgccatctcgtgctcagtctgtctctctcttgacgcggttctatctagttacgcgttaaaccaactagaaatttttt

SEQ ID NO: 715 - DNA, 199 bp, Artificial Sequence
  Synthetic
ggcccagactgagcacgtgagttttagagctagaaatagcaagttaaaataaggctagtccgttatcaacttgaaaaagtggcaccgagtcggtgctggaggaagcagggcttcctttcctctgccatctcgtgctcagtctgtctctctcttgacgcggttctatctagttacgcgttaaaccaactagaaatttttt

SEQ ID NO: 716 - DNA, 193 bp, Artificial Sequence
  Synthetic
ggcccagactgagcacgtgagttttagagctagaaatagcaagttaaaataaggctagtccgttatcaacttgaaaaagtggcaccgagtcggtgcttcctctgccatctcgtgctcagtctgtctctctcgggtcaggagccccccccctgaacccaggataaccctcaaagtcggggggcaaccctttttt

SEQ ID NO: 717 - DNA, 203 bp, Artificial Sequence
  Synthetic
ggcccagactgagcacgtgagttttagagctagaaatagcaagttaaaataaggctagtccgttatcaacttgaaaaagtggcaccgagtcggtgcagggcttcctttcctctgccatctcgtgctcagtctgtctctctcgggtcaggagccccccccctgaacccaggataaccctcaaagtcggggggcaaccctttttt

SEQ ID NO: 718 - DNA, 213 bp, Artificial Sequence
  Synthetic
ggcccagactgagcacgtgagttttagagctagaaatagcaagttaaaataaggctagtccgttatcaacttgaaaaagtggcaccgagtcggtgctggaggaagcagggcttcctttcctctgccatctcgtgctcagtctgtctctctcgggtcaggagccccccccctgaacccaggataaccctcaaagtcggggggcaaccctttttt

SEQ ID NO: 719 - DNA, 127 bp, Artificial Sequence
  Synthetic
gattcctggtgccagaaacagttttagagctagaaatagcaagttaaaataaggctagtccgttatcaacttgaaaaagtggcaccgagtcggtgcgtcaccactgtttctggcaccaggatttttt

SEQ ID NO: 720 - DNA, 138 bp, Artificial Sequence
  Synthetic
gattcctggtgccagaaacagttttagagctagaaatagcaagttaaaataaggctagtccgttatcaacttgaaaaagtggcaccgagtcggtgctctgccctcccgtcaccactgtttctggcaccaggatttttt

SEQ ID NO: 721 - DNA, 147 bp, Artificial Sequence
  Synthetic
gattcctggtgccagaaacagttttagagctagaaatagcaagttaaaataaggctagtccgttatcaacttgaaaaagtggcaccgagtcggtgcaggactagttctgccctcccgtcaccactgtttctggcaccaggatttttt

SEQ ID NO: 722 - DNA, 135 bp, Artificial Sequence
  Synthetic
gattcctggtgccagaaacagttttagagctagaaatagcaagttaaaataaggctagtccgttatcaacttgaaaaagtggcaccgagtcggtgcgtcaccactgtttctggcaccaggacctcttcttttttt

SEQ ID NO: 723 - DNA, 146 bp, Artificial Sequence
  Synthetic
gattcctggtgccagaaacagttttagagctagaaatagcaagttaaaataaggctagtccgttatcaacttgaaaaagtggcaccgagtcggtgctctgccctcccgtcaccactgtttctggcaccaggacctcttcttttttt

SEQ ID NO: 724 - DNA, 155 bp, Artificial Sequence
  Synthetic
gattcctggtgccagaaacagttttagagctagaaatagcaagttaaaataaggctagtccgttatcaacttgaaaaagtggcaccgagtcggtgcaggactagttctgccctcccgtcaccactgtttctggcaccaggacctcttcttttttt

SEQ ID NO: 725 - DNA, 188 bp, Artificial Sequence
  Synthetic
gattcctggtgccagaaacagttttagagctagaaatagcaagttaaaataaggctagtccgttatcaacttgaaaaagtggcaccgagtcggtgctctgccctcccgtcaccactgtttctggcaccaggacctcttctttgacgcggttctatctagttacgcgttaaaccaactagaaatttttt

SEQ ID NO: 726 - DNA, 197 bp, Artificial Sequence
  Synthetic
gattcctggtgccagaaacagttttagagctagaaatagcaagttaaaataaggctagtccgttatcaacttgaaaaagtggcaccgagtcggtgcaggactagttctgccctcccgtcaccactgtttctggcaccaggacctcttctttgacgcggttctatctagttacgcgttaaaccaactagaaatttttt

SEQ ID NO: 727 - DNA, 191 bp, Artificial Sequence
  Synthetic
gattcctggtgccagaaacagttttagagctagaaatagcaagttaaaataaggctagtccgttatcaacttgaaaaagtggcaccgagtcggtgcgtcaccactgtttctggcaccaggacctcttctgggtcaggagccccccccctgaacccaggataaccctcaaagtcggggggcaaccctttttt

SEQ ID NO: 728 - DNA, 202 bp, Artificial Sequence
  Synthetic
gattcctggtgccagaaacagttttagagctagaaatagcaagttaaaataaggctagtccgttatcaacttgaaaaagtggcaccgagtcggtgctctgccctcccgtcaccactgtttctggcaccaggacctcttctgggtcaggagccccccccctgaacccaggataaccctcaaagtcggggggcaaccctttttt

SEQ ID NO: 729 - DNA, 211 bp, Artificial Sequence
  Synthetic
gattcctggtgccagaaacagttttagagctagaaatagcaagttaaaataaggctagtccgttatcaacttgaaaaagtggcaccgagtcggtgcaggactagttctgccctcccgtcaccactgtttctggcaccaggacctcttctgggtcaggagccccccccctgaacccaggataaccctcaaagtcggggggcaaccctttttt

SEQ ID NO: 730 - DNA, 132 bp, Artificial Sequence
  Synthetic
gcattttcaggaggaagcgagttttagagctagaaatagcaagttaaaataaggctagtccgttatcaacttgaaaaagtggcaccgagtcggtgcatgactcaaatatgccttcctcctgaaaattttttt

SEQ ID NO: 731 - DNA, 142 bp, Artificial Sequence
  Synthetic
gcattttcaggaggaagcgagttttagagctagaaatagcaagttaaaataaggctagtccgttatcaacttgaaaaagtggcaccgagtcggtgctacgaaggaaatgactcaaatatgccttcctcctgaaaattttttt

SEQ ID NO: 732 - DNA, 152 bp, Artificial Sequence
  Synthetic
gcattttcaggaggaagcgagttttagagctagaaatagcaagttaaaataaggctagtccgttatcaacttgaaaaagtggcaccgagtcggtgcgcactgtgggtacgaaggaaatgactcaaatatgccttcctcctgaaaattttttt

SEQ ID NO: 733 - DNA, 140 bp, Artificial Sequence
  Synthetic
gcattttcaggaggaagcgagttttagagctagaaatagcaagttaaaataaggctagtccgttatcaacttgaaaaagtggcaccgagtcggtgcatgactcaaatatgccttcctcctgaaaataactctcttttttt

SEQ ID NO: 734 - DNA, 150 bp, Artificial Sequence
  Synthetic
gcattttcaggaggaagcgagttttagagctagaaatagcaagttaaaataaggctagtccgttatcaacttgaaaaagtggcaccgagtcggtgctacgaaggaaatgactcaaatatgccttcctcctgaaaataactctcttttttt

SEQ ID NO: 735 - DNA, 160 bp, Artificial Sequence
  Synthetic
gcattttcaggaggaagcgagttttagagctagaaatagcaagttaaaataaggctagtccgttatcaacttgaaaaagtggcaccgagtcggtgcgcactgtgggtacgaaggaaatgactcaaatatgccttcctcctgaaaataactctcttttttt

SEQ ID NO: 736 - DNA, 182 bp, Artificial Sequence
  Synthetic
gcattttcaggaggaagcgagttttagagctagaaatagcaagttaaaataaggctagtccgttatcaacttgaaaaagtggcaccgagtcggtgcatgactcaaatatgccttcctcctgaaaataactctctttgacgcggttctatctagttacgcgttaaaccaactagaaatttttt

SEQ ID NO: 737 - DNA, 202 bp, Artificial Sequence
  Synthetic
gcattttcaggaggaagcgagttttagagctagaaatagcaagttaaaataaggctagtccgttatcaacttgaaaaagtggcaccgagtcggtgcgcactgtgggtacgaaggaaatgactcaaatatgccttcctcctgaaaataactctctttgacgcggttctatctagttacgcgttaaaccaactagaaatttttt

SEQ ID NO: 738 - DNA, 196 bp, Artificial Sequence
  Synthetic
gcattttcaggaggaagcgagttttagagctagaaatagcaagttaaaataaggctagtccgttatcaacttgaaaaagtggcaccgagtcggtgcatgactcaaatatgccttcctcctgaaaataactctctgggtcaggagccccccccctgaacccaggataaccctcaaagtcggggggcaaccctttttt

SEQ ID NO: 739 - DNA, 206 bp, Artificial Sequence
  Synthetic
gcattttcaggaggaagcgagttttagagctagaaatagcaagttaaaataaggctagtccgttatcaacttgaaaaagtggcaccgagtcggtgctacgaaggaaatgactcaaatatgccttcctcctgaaaataactctctgggtcaggagccccccccctgaacccaggataaccctcaaagtcggggggcaaccctttttt

SEQ ID NO: 740 - DNA, 216 bp, Artificial Sequence
  Synthetic
gcattttcaggaggaagcgagttttagagctagaaatagcaagttaaaataaggctagtccgttatcaacttgaaaaagtggcaccgagtcggtgcgcactgtgggtacgaaggaaatgactcaaatatgccttcctcctgaaaataactctctgggtcaggagccccccccctgaacccaggataaccctcaaagtcggggggcaaccctttttt

SEQ ID NO: 741 - DNA, 147 bp, Artificial Sequence
  Synthetic
gattcctggtgccagaaacagttttagagctagaaatagcaagttaaaataaggctagtccgttatcaacttgaaaaagtggcaccgagtcggtgcaggaggaagctgctaaggactagttctgcccttctggcaccaggatttttt

SEQ ID NO: 742 - DNA, 197 bp, Artificial Sequence
  Synthetic
gattcctggtgccagaaacagttttagagctagaaatagcaagttaaaataaggctagtccgttatcaacttgaaaaagtggcaccgagtcggtgcaggaggaagctgctaaggactagttctgcccttctggcaccaggacctcttctttgacgcggttctatctagttacgcgttaaaccaactagaaatttttt

SEQ ID NO: 743 - DNA, 131 bp, Artificial Sequence
  Synthetic
gtcatcttagtcattacctggttttagagctagaaatagcaagttaaaataaggctagtccgttatcaacttgaaaaagtggcaccgagtcggtgcaacgaacacctcatgtaatgactaagatgtttttt

SEQ ID NO: 744 - DNA, 181 bp, Artificial Sequence
  Synthetic
gtcatcttagtcattacctggttttagagctagaaatagcaagttaaaataaggctagtccgttatcaacttgaaaaagtggcaccgagtcggtgcaacgaacacctcatgtaatgactaagatgtcatctctttgacgcggttctatctagttacgcgttaaaccaactagaaatttttt

SEQ ID NO: 745 - DNA, 195 bp, Artificial Sequence
  Synthetic
gtcatcttagtcattacctggttttagagctagaaatagcaagttaaaataaggctagtccgttatcaacttgaaaaagtggcaccgagtcggtgcaacgaacacctcatgtaatgactaagatgtcatctctgggtcaggagccccccccctgaacccaggataaccctcaaagtcggggggcaaccctttttt

SEQ ID NO: 746 - DNA, 173 bp, Artificial Sequence
  Synthetic
ggccgacagtcacctcctgagttttagagctagaaatagcaagttaaaataaggctagtccgttatcaacttgaaaaagtggcaccgagtcggtgctggaggaagcagggcttcctttcctctgccatcacttatcgtcgtcatccttgtaatccgtgctcagtctgtttttt

SEQ ID NO: 747 - DNA, 237 bp, Artificial Sequence
  Synthetic
ggccgacagtcacctcctgagttttagagctagaaatagcaagttaaaataaggctagtccgttatcaacttgaaaaagtggcaccgagtcggtgctggaggaagcagggcttcctttcctctgccatcacttatcgtcgtcatccttgtaatccgtgctcagtctgtctctctcgggtcaggagccccccccctgaacccaggataaccctcaaagtcggggggcaaccctttttt

SEQ ID NO: 748 - DNA, 223 bp, Artificial Sequence
  Synthetic
ggccgacagtcacctcctgagttttagagctagaaatagcaagttaaaataaggctagtccgttatcaacttgaaaaagtggcaccgagtcggtgctggaggaagcagggcttcctttcctctgccatcacttatcgtcgtcatccttgtaatccgtgctcagtctgtctctctcttgacgcggttctatctagttacgcgttaaaccaactagaaatttttt

SEQ ID NO: 749 - DNA, 223 bp, Artificial Sequence
  Synthetic
ggcccagactgagcacgtgagttttagagctagaaatagcaagttaaaataaggctagtccgttatcaacttgaaaaagtggcaccgagtcggtgctggaggaagcagggcttcctttcctctgccatcacttatcgtcgtcatccttgtaatccgtgctcagtctgtctctctcttgacgcggttctatctacttacgcgttaaaccaactagaaatttttt

SEQ ID NO: 750 - DNA, 179 bp, Artificial Sequence
  Synthetic
ggcccagactgagcacgtgagttttagagctagaaatagcaagttaaaataaggctagtccgttatcaacttgaaaaagtggcaccgagtcggtgcttcctctgccatctcgtgctcagtctgtctctctcttgacgcggttctatctacttacgcgttaaaccaactagaaatttttt

SEQ ID NO: 751 - DNA, 149 bp, Artificial Sequence
  Synthetic
ggcccagactgagcacgtgagttttagagctagaaatagcaagttaaaataaggctagtccgttatcaacttgaaaaagtggcaccgagtcggtgctcctgcgacgccctctggaggaagcagggcttcccgtgctcagtctgtttttt

SEQ ID NO: 752 - DNA, 199 bp, Artificial Sequence
  Synthetic
ggcccagactgagcacgtgagttttagagctagaaatagcaagttaaaataaggctagtccgttatcaacttgaaaaagtggcaccgagtcggtgctcctgcgacgccctctggaggaagcagggcttcccgtgctcagtctgtctctctcttgacgcggttctatctagttacgcgttaaaccaactagaaatttttt

SEQ ID NO: 753 - DNA, 199 bp, Artificial Sequence
  Synthetic
ggcccagactgagcacgtgagttttagagctagaaatagcaagttaaaataaggctagtccgttatcaacttgaaaaagtggcaccgagtcggtgctcctgcgacgccctctggaggaagcagggcttcccgtgctcagtctgtctctctcttgacgcggttctatctacttacgcgttaaaccaactagaaatttttt

SEQ ID NO: 754 - DNA, 213 bp, Artificial Sequence
  Synthetic
gtcatcttagtcattacctggttttagagctagaaatagcaagttaaaataaggctagtccgttatcaacttgaaaaagtggcaccgagtcggtgctgagttacaacgaacacctcagcttatcgtcgtcatccttgtaatcgtaatgactaagatgtcatctctttgacgcggttctatctacttacgcgttaaaccaactagaaatttttt

SEQ ID NO: 755 - DNA, 181 bp, Artificial Sequence
  Synthetic
gtcatcttagtcattacctggttttagagctagaaatagcaagttaaaataaggctagtccgttatcaacttgaaaaagtggcaccgagtcggtgcaacgaacacctcatgtaatgactaagatgtcatctctttgacgcggttctatctacttacgcgttaaaccaactagaaatttttt

SEQ ID NO: 756 - DNA, 152 bp, Artificial Sequence
  Synthetic
gtcatcttagtcattacctggttttagagctagaaatagcaagttaaaataaggctagtccgttatcaacttgaaaaagtggcaccgagtcggtgctaagcaaaacatgggaactcagtttatatgagttagtaatgactaagatgtttttt

SEQ ID NO: 757 - DNA, 202 bp, Artificial Sequence
  Synthetic
gtcatcttagtcattacctggttttagagctagaaatagcaagttaaaataaggctagtccgttatcaacttgaaaaagtggcaccgagtcggtgctaagcaaaacatgggaactcagtttatatgagttagtaatgactaagatgtcatctctttgacgcggttctatctagttacgcgttaaaccaactagaaatttttt

SEQ ID NO: 758 - DNA, 202 bp, Artificial Sequence
  Synthetic
gtcatcttagtcattacctggttttagagctagaaatagcaagttaaaataaggctagtccgttatcaacttgaaaaagtggcaccgagtcggtgctaagcaaaacatgggaactcagtttatatgagttagtaatgactaagatgtcatctctttgacgcggttctatctacttacgcgttaaaccaactagaaatttttt

SEQ ID NO: 759 - DNA, 126 bp, Artificial Sequence
  Synthetic
gcagtggtggggggccttgggttttagagctagaaatagcaagttaaaataaggctagtccgttatcaacttgaaaaagtggcaccgagtcggtgcatgtagacgccaaggccccccacctttttt

SEQ ID NO: 760 - DNA, 171 bp, Artificial Sequence
  Synthetic
gcagtggtggggggccttgggttttagagctagaaatagcaagttaaaataaggctagtccgttatcaacttgaaaaagtggcaccgagtcggtgcatgtagacgccaaggccccccacctagacacacgcggttctatctagttacgcgttaaaccaactagaatttttt

SEQ ID NO: 761 - DNA, 135 bp, Artificial Sequence
  Synthetic
gatccttccagtcagggccatgttttagagctagaaatagcaagttaaaataaggctagtccgttatcaacttgaaaaagtggcaccgagtcggtgcgtacctgaaccgtatatcttatggccctgacttttttt

SEQ ID NO: 762 - DNA, 180 bp, Artificial Sequence
  Synthetic
gatccttccagtcagggccatgttttagagctagaaatagcaagttaaaataaggctagtccgttatcaacttgaaaaagtggcaccgagtcggtgcgtacctgaaccgtatatcttatggccctgacttctctctccgcggttctatctagttacgcgttaaaccaactagaatttttt

SEQ ID NO: 763 - DNA, 143 bp, Artificial Sequence
  Synthetic
gcaaagtgagagccaagggctgttttagagctagaaatagcaagttaaaataaggctagtccgttatcaacttgaaaaagtggcaccgagtcggtgcgccctatgctctagcttccatccaagcccttggctctcactttttt

SEQ ID NO: 764 - DNA, 188 bp, Artificial Sequence
  Synthetic
gcaaagtgagagccaagggctgttttagagctagaaatagcaagttaaaataaggctagtccgttatcaacttgaaaaagtggcaccgagtcggtgcgccctatgctctagcttccatccaagcccttggctctcacaatcctttcgcggttctatctagttacgcgttaaaccaactagaatttttt

SEQ ID NO: 765 - DNA, 133 bp, Artificial Sequence
  Synthetic
ggagatctctgaagtgaagagttttagagctagaaatagcaagttaaaataaggctagtccgttatcaacttgaaaaagtggcaccgagtcggtgcggaattctgtatccatcttcacttcagagattttttt

SEQ ID NO: 766 - DNA, 178 bp, Artificial Sequence
  Synthetic
ggagatctctgaagtgaagagttttagagctagaaatagcaagttaaaataaggctagtccgttatcaacttgaaaaagtggcaccgagtcggtgcggaattctgtatccatcttcacttcagagataataagaccgcggttctatctagttacgcgttaaaccaactagaatttttt

SEQ ID NO: 767 - DNA, 133 bp, Artificial Sequence
  Synthetic
gctgggagagggagcccctccgttttagagctagaaatagcaagttaaaataaggctagtccgttatcaacttgaaaaagtggcaccgagtcggtgcttctgctctcaccgggaggggctccctctctttttt

SEQ ID NO: 768 - DNA, 178 bp, Artificial Sequence
  Synthetic
gctgggagagggagcccctccgttttagagctagaaatagcaagttaaaataaggctagtccgttatcaacttgaaaaagtggcaccgagtcggtgcttctgctctcaccgggaggggctccctctcgaattcgacgcggttctatctagttacgcgttaaaccaactagaatttttt

SEQ ID NO: 769 - DNA, 129 bp, Artificial Sequence
  Synthetic
gcagccgttgccatctgctgcgttttagagctagaaatagcaagttaaaataaggctagtccgttatcaacttgaaaaagtggcaccgagtcggtgcgccggctccgtcagcagatggcaacgtttttt

SEQ ID NO: 770 - DNA, 174 bp, Artificial Sequence
  Synthetic
gcagccgttgccatctgctgcgttttagagctagaaatagcaagttaaaataaggctagtccgttatcaacttgaaaaagtggcaccgagtcggtgcgccggctccgtcagcagatggcaacgaagagacacgcggttctatctagttacgcgttaaaccaactagaatttttt

SEQ ID NO: 771 - DNA, 137 bp, Artificial Sequence
  Synthetic
gcacgggccagtgagtcctccgttttagagctagaaatagcaagttaaaataaggctagtccgttatcaacttgaaaaagtggcaccgagtcggtgcggcgaagctttgagacctggaggactcactggcctttttt

SEQ ID NO: 772 - DNA, 182 bp, Artificial Sequence
  Synthetic
gcacgggccagtgagtcctccgttttagagctagaaatagcaagttaaaataaggctagtccgttatcaacttgaaaaagtggcaccgagtcggtgcggcgaagctttgagacctggaggactcactggccataaattgcgcggttctatctagttacgcgttaaaccaactagaatttttt

SEQ ID NO: 773 - DNA, 131 bp, Artificial Sequence
  Synthetic
gctctatgaaccgtacctgctgttttagagctagaaatagcaagttaaaataaggctagtccgttatcaacttgaaaaagtggcaccgagtcggtgctggatggcactgagcaggtacggttcattttttt

SEQ ID NO: 774 - DNA, 176 bp, Artificial Sequence
  Synthetic
gctctatgaaccgtacctgctgttttagagctagaaatagcaagttaaaataaggctagtccgttatcaacttgaaaaagtggcaccgagtcggtgctggatggcactgagcaggtacggttcatcactataccgcggttctatctagttacgcgttaaaccaactagaatttttt

SEQ ID NO: 775 - DNA, 130 bp, Artificial Sequence
  Synthetic
gccctccactagggcaagggtgttttagagctagaaatagcaagttaaaataaggctagtccgttatcaacttgaaaaagtggcaccgagtcggtgcgctacctgcccacccttgccctagtggtttttt

SEQ ID NO: 776 - DNA, 175 bp, Artificial Sequence
  Synthetic
gccctccactagggcaagggtgttttagagctagaaatagcaagttaaaataaggctagtccgttatcaacttgaaaaagtggcaccgagtcggtgcgctacctgcccacccttgccctagtggtttaaatccgcggttctatctagttacgcgttaaaccaactagaatttttt

SEQ ID NO: 777 - DNA, 130 bp, Artificial Sequence
  Synthetic
gtacggtctcctgcacagatgttttagagctagaaatagcaagttaaaataaggctagtccgttatcaacttgaaaaagtggcaccgagtcggtgcgtcttctatctgatctgtgcaggagacctttttt

SEQ ID NO: 778 - DNA, 175 bp, Artificial Sequence
  Synthetic
gtacggtctcctgcacagatgttttagagctagaaatagcaagttaaaataaggctagtccgttatcaacttgaaaaagtggcaccgagtcggtgcgtcttctatctgatctgtgcaggagacctcctaattcgcggttctatctagttacgcgttaaaccaactagaatttttt

SEQ ID NO: 779 - DNA, 131 bp, Artificial Sequence
  Synthetic
gtgactgcaggaagctctggagttttagagctagaaatagcaagttaaaataaggctagtccgttatcaacttgaaaaagtggcaccgagtcggtgcgctccgagtccatccagagcttcctgcatttttt

SEQ ID NO: 780 - DNA, 176 bp, Artificial Sequence
  Synthetic
gtgactgcaggaagctctggagttttagagctagaaatagcaagttaaaataaggctagtccgttatcaacttgaaaaagtggcaccgagtcggtgcgctccgagtccatccagagcttcctgcaatagaatgcgcggttctatctagttacgcgttaaaccaactagaatttttt

SEQ ID NO: 781 - DNA, 127 bp, Artificial Sequence
  Synthetic
gattcctggtgccagaaacagttttagagctagaaatagcaagttaaaataaggctagtccgttatcaacttgaaaaagtggcaccgagtcggtgctagttctgcccttctggcaccaggatttttt

SEQ ID NO: 782 - DNA, 137 bp, Artificial Sequence
  Synthetic
gattcctggtgccagaaacagttttagagctagaaatagcaagttaaaataaggctagtccgttatcaacttgaaaaagtggcaccgagtcggtgctgctaaggactagttctgcccttctggcaccaggatttttt

SEQ ID NO: 783 - DNA, 135 bp, Artificial Sequence
  Synthetic
gattcctggtgccagaaacagttttagagctagaaatagcaagttaaaataaggctagtccgttatcaacttgaaaaagtggcaccgagtcggtgctagttctgcccttctggcaccaggacctcttcttttttt

SEQ ID NO: 784 - DNA, 145 bp, Artificial Sequence
  Synthetic
gattcctggtgccagaaacagttttagagctagaaatagcaagttaaaataaggctagtccgttatcaacttgaaaaagtggcaccgagtcggtgctgctaaggactagttctgcccttctggcaccaggacctcttcttttttt

SEQ ID NO: 785 - DNA, 155 bp, Artificial Sequence
  Synthetic
gattcctggtgccagaaacagttttagagctagaaatagcaagttaaaataaggctagtccgttatcaacttgaaaaagtggcaccgagtcggtgcaggaggaagctgctaaggactagttctgcccttctggcaccaggacctcttcttttttt

SEQ ID NO: 786 - DNA, 177 bp, Artificial Sequence
  Synthetic
gattcctggtgccagaaacagttttagagctagaaatagcaagttaaaataaggctagtccgttatcaacttgaaaaagtggcaccgagtcggtgctagttctgcccttctggcaccaggacctcttctttgacgcggttctatctagttacgcgttaaaccaactagaaatttttt

SEQ ID NO: 787 - DNA, 48 bp, Artificial Sequence
  Synthetic
aggaaccccgggtctgactcgtgcactaccgtctcctttcctctgcag

SEQ ID NO: 788 - protein, 8 aa, Artificial Sequence
  Synthetic
SLGPRLST

SEQ ID NO: 789 - DNA, 45 bp, Artificial Sequence
  Synthetic
aaccccgggtctgactcgtgcactaccgtctcgtgtcctctgcag

SEQ ID NO: 790 - protein, 7 aa, Artificial Sequence
  Synthetic
LGPRLST

SEQ ID NO: 791 - DNA, 48 bp, Artificial Sequence
  Synthetic
tccttggggcccagactgagcacgtgatggcagaggaaaggagacgtc

SEQ ID NO: 792 - DNA, 48 bp, Artificial Sequence
  Synthetic
tccttggggcccagactgagcacgagatggcagaggaaaggagacgtc

SEQ ID NO: 793 - DNA, 45 bp, Artificial Sequence
  Synthetic
ttggggcccagactgagcacgtgatggcagagcacaggagacgtc

SEQ ID NO: 794 - DNA, 45 bp, Artificial Sequence
  Synthetic
ttggggcccagactgagcacgagatggcagagcacaggagacgtc

SEQ ID NO: 795 - DNA, 297 bp, Artificial Sequence
  Synthetic
atgtgggctgcctagaaaggcatggatgagagaagcctggagacagggatcccagggaaacgcccatgcaattagtctatttctgctgcaagtaagcatgcatttgtaggcttgatgctttttttctgcttctccagccctggcctgggtcaatccttggggcccagactgagcacgtgatggcagaggaaaggaagccctgcttcctccagagggcgtcgcaggacagcttttcctagacaggggctagtatgtgcagctcctgcaccgggatactggttgacaagtttggctggg

SEQ ID NO: 796 - DNA, 297 bp, Artificial Sequence
  Synthetic
cccagccaaacttgtcaaccagtatcccggtgcaggagctgcacatactagcccctgtctaggaaaagctgtcctgcgacgccctctggaggaagcagggcttcctttcctctgccatcacgtgctcagtctgggccccaaggattgacccaggccagggctggagaagcagaaaaaaagcatcaagcctacaaatgcatgcttacttgcagcagaaatagactaattgcatgggcgtttccctgggatccctgtctccaggcttctctcatccatgcctttctaggcagcccacat

SEQ ID NO: 797 - DNA, 40 bp, Artificial Sequence
  Synthetic
tggggcccagactgagcacgtgatggcagaggaaaggaag

SEQ ID NO: 798 - DNA, 40 bp, Artificial Sequence
  Synthetic
tggggcccagactgagcacgtgatggcaaaggaaaggaag

SEQ ID NO: 799 - DNA, 40 bp, Artificial Sequence
  Synthetic
tggggcccagactgagcacgagatggcagaggaaaggaag

SEQ ID NO: 800 - DNA, 40 bp, Artificial Sequence
  Synthetic
tggggcccagactgagcacgagatggcaaaggaaaggaag

SEQ ID NO: 801 - DNA, 29 bp, Artificial Sequence
  Synthetic
ctgagcacgtgatggcagaggaaaggaag

SEQ ID NO: 802 - DNA, 19 bp, Artificial Sequence
  Synthetic
ctgagcacgggaaaggaag

SEQ ID NO: 803 - DNA, 29 bp, Artificial Sequence
  Synthetic
ctgagcacgtgatggcaaaggaaaggaag

SEQ ID NO: 804 - DNA, 9 bp, Artificial Sequence
  Synthetic
ctgagcacg

SEQ ID NO: 805 - DNA, 16 bp, Artificial Sequence
  Synthetic
ctgagcacgggaaagg

SEQ ID NO: 806 - DNA, 29 bp, Artificial Sequence
  Synthetic
ctgagcacgtgatggcaggggaaaggaag

SEQ ID NO: 807 - DNA, 31 bp, Artificial Sequence
  Synthetic
gactgagcacgtgatggcagaggaaaggaag

SEQ ID NO: 808 - DNA, 31 bp, Artificial Sequence
  Synthetic
gactgagcacgcaccatcatcaccatcattg

SEQ ID NO: 809 - DNA, 31 bp, Artificial Sequence
  Synthetic
gactgagcacgtgatggcaaaggaaaggaag

SEQ ID NO: 810 - DNA, 31 bp, Artificial Sequence
  Synthetic
gactgagcacggattacaaggatgacgacga

SEQ ID NO: 811 - protein, 7 aa, Artificial Sequence
  Synthetic
GLGGTML

SEQ ID NO: 812 - DNA, 21 bp, Artificial Sequence
  Synthetic
ggccttggcggctacatgctg

SEQ ID NO: 813 - DNA, 21 bp, Artificial Sequence
  Synthetic
ggccttggcgtctacatgctg

SEQ ID NO: 814 - protein, 7 aa, Artificial Sequence
  Synthetic
GLGVTML

SEQ ID NO: 815 - DNA, 36 bp, Artificial Sequence
  Synthetic
ggggcagtggtggggggccttggcggctacatgctg

SEQ ID NO: 816 - DNA, 43 bp, Artificial Sequence
  Synthetic
gcagtggtggggggccttggatgtagacgccaaggccccccac

SEQ ID NO: 817 - protein, 25 aa, Artificial Sequence
  Synthetic
NFKIRHNIEDGSVQLADHYQQNTPI

SEQ ID NO: 818 - protein, 24 aa, Artificial Sequence
  Synthetic
NFKIHNIEDGSVQLADHYQQNTPI

SEQ ID NO: 819 - protein, 24 aa, Artificial Sequence
  Synthetic
NFKIRNIEDGSVQLADHYQQNTPI

SEQ ID NO: 820 - protein, 24 aa, Artificial Sequence
  Synthetic
NFKIRHNEDGSVQLADHYQQNTPI

SEQ ID NO: 821 - protein, 19 aa, Artificial Sequence
  Synthetic
NFKIRHNQLADHYQQNTPI

SEQ ID NO: 822 - protein, 20 aa, Artificial Sequence
  Synthetic
HNIEDGSVQLADHYQQNTPI

SEQ ID NO: 823 - protein, 14 aa, Artificial Sequence
  Synthetic
NFKIRHNIEDGSVQ

SEQ ID NO: 824 - DNA, 12 bp, Artificial Sequence
  Synthetic
actgcaagtgca

SEQ ID NO: 825 - DNA, 12 bp, Artificial Sequence
  Synthetic
tgcagtgttcac

SEQ ID NO: 826 - RNA, 122 nt, Artificial Sequence
  Synthetic
ggcccagacugagcacgugaguuuuagagcuagaaauagcaaguuaaaauaaggcuaguccguuaucaacuugaaaaaguggcaccgagucggugcucugccaucucgugcucagucuguuu

SEQ ID NO: 827 - DNA, 28 bp, Artificial Sequence
  Synthetic
ggcccagactgagcacgtgatggcagag

SEQ ID NO: 828 - DNA, 28 bp, Artificial Sequence
  Synthetic
gagatggcagagcagggggggggggggg

SEQ ID NO: 829 - DNA, 31 bp, Artificial Sequence
  Synthetic
gagatggcagagcaaaaaaaaaaaaaaaaaa

SEQ ID NO: 830 - DNA, 32 bp, Artificial Sequence
  Synthetic
ggcccagactgagcacgtgatggcagagcaca

SEQ ID NO: 831 - DNA, 32 bp, Artificial Sequence
  Synthetic
ggcccagactgagcacgagatggcagagcaca

SEQ ID NO: 832 - DNA, 24 bp, Artificial Sequence
  Synthetic
tccagatggcacattgtcagaggg

SEQ ID NO: 833 - DNA, 24 bp, Artificial Sequence
  Synthetic
tgacgggagggcagaactagtcct

SEQ ID NO: 834 - DNA, 24 bp, Artificial Sequence
  Synthetic
ttcagacagcatatttgagtcatt

SEQ ID NO: 835 - DNA, 40 bp, Artificial Sequence
  Synthetic
tggggcccagactgagcacgtgatggcagcggaaaggaag

SEQ ID NO: 836 - DNA, 40 bp, Artificial Sequence
  Synthetic
tggggcccagactgagcacgctttgatggcagaggaaagg

SEQ ID NO: 837 - DNA, 40 bp, Artificial Sequence
  Synthetic
tggggcccagactgagcacgcttttgatggcagaggaaag

SEQ ID NO: 838 - DNA, 39 bp, Artificial Sequence
  Synthetic
tggggcccagactgagcactgatggcagaggaaaggaag

SEQ ID NO: 839 - DNA, 38 bp, Artificial Sequence
  Synthetic
tggggcccagactgagcatgatggcagaggaaaggaag

SEQ ID NO: 840 - DNA, 38 bp, Artificial Sequence
  Synthetic
tggggcccagactgagcacgatggcagaggaaaggaag

SEQ ID NO: 841 - DNA, 40 bp, Artificial Sequence
  Synthetic
tggggcccagactgagcacggtgatggcagaggaaaggaa

SEQ ID NO: 842 - DNA, 39 bp, Artificial Sequence
  Synthetic
tggggcccagactgagcacggatggcagaggaaaggaag

SEQ ID NO: 843 - DNA, 40 bp, Artificial Sequence
  Synthetic
tggggcccagactgagcacgttgatggcagaggaaaggaa

SEQ ID NO: 844 - DNA, 32 bp, Artificial Sequence
  Synthetic
tggggcccagactgatggcagaggaaaggaag

SEQ ID NO: 845 - DNA, 40 bp, Artificial Sequence
  Synthetic
tggggcccagactgagcacgatgatggcagaggaaaggaa

SEQ ID NO: 846 - DNA, 34 bp, Artificial Sequence
  Synthetic
tggggcccagactgagcacgcagaggaaaggaag

SEQ ID NO: 847 - DNA, 26 bp, Artificial Sequence
  Synthetic
tggggctgatggcagaggaaaggaag

SEQ ID NO: 848 - DNA, 30 bp, Artificial Sequence
  Synthetic
tggggcccagactgagcagaggaaaggaag

SEQ ID NO: 849 - DNA, 40 bp, Artificial Sequence
  Synthetic
tggggcccagactgagcacgctgatggcagaggaaaggaa

SEQ ID NO: 850 - DNA, 27 bp, Artificial Sequence
  Synthetic
tggggcctgatggcagaggaaaggaag

SEQ ID NO: 851 - DNA, 25 bp, Artificial Sequence
  Synthetic
tggggtgatggcagaggaaaggaag

SEQ ID NO: 852 - DNA, 31 bp, Artificial Sequence
  Synthetic
tggggcccagactgagcacgaggaaaggaag

SEQ ID NO: 853 - DNA, 33 bp, Artificial Sequence
  Synthetic
tggggcccagactgagcacgagaggaaaggaag

SEQ ID NO: 854 - DNA, 36 bp, Artificial Sequence
  Synthetic
tggggcccagactgagcacgggcagaggaaaggaag

SEQ ID NO: 855 - DNA, 25 bp, Artificial Sequence
  Synthetic
tggggcccagactgaggaaaggaag

SEQ ID NO: 856 - DNA, 19 bp, Artificial Sequence
  Synthetic
tggggcagaggaaaggaag

SEQ ID NO: 857 - DNA, 29 bp, Artificial Sequence
  Synthetic
tggggcccagactgagcacggaaaggaag

SEQ ID NO: 858 - DNA, 28 bp, Artificial Sequence
  Synthetic
tggggcccagatggcagaggaaaggaag

SEQ ID NO: 859 - DNA, 28 bp, Artificial Sequence
  Synthetic
tggggcccagactgagcacgaaaggaag

SEQ ID NO: 860 - DNA, 21 bp, Artificial Sequence
  Synthetic
tggatggcagaggaaaggaag

SEQ ID NO: 861 - DNA, 39 bp, Artificial Sequence
  Synthetic
tggggcccagactgagctttgatggcagaggaaaggaag

SEQ ID NO: 862 - DNA, 23 bp, Artificial Sequence
  Synthetic
tggggcccagactgagcacgaag

SEQ ID NO: 863 - DNA, 32 bp, Artificial Sequence
  Synthetic
tggggcccagactgagcacggaggaaaggaag

SEQ ID NO: 864 - DNA, 24 bp, Artificial Sequence
  Synthetic
tggggcccagactgagcacggaag

SEQ ID NO: 865 - DNA, 21 bp, Artificial Sequence
  Synthetic
tggggcccagaggaaaggaag

SEQ ID NO: 866 - DNA, 30 bp, Artificial Sequence
  Synthetic
tggggcccagtgatggcagaggaaaggaag

SEQ ID NO: 867 - DNA, 23 bp, Artificial Sequence
  Synthetic
tggtgatggcagaggaaaggaag

SEQ ID NO: 868 - DNA, 40 bp, Artificial Sequence
  Synthetic
tggggcccagactgagcacgtgtgatggcagaggaaagga

SEQ ID NO: 869 - DNA, 18 bp, Artificial Sequence
  Synthetic
atggcagaggaaaggaag

SEQ ID NO: 870 - DNA, 34 bp, Artificial Sequence
  Synthetic
tggggcccagactgtgatggcagaggaaaggaag

SEQ ID NO: 871 - DNA, 36 bp, Artificial Sequence
  Synthetic
tggggcccagactgagtgatggcagaggaaaggaag

SEQ ID NO: 872 - DNA, 28 bp, Artificial Sequence
  Synthetic
tggggccctgatggcagaggaaaggaag

SEQ ID NO: 873 - DNA, 35 bp, Artificial Sequence
  Synthetic
tggggcccagactgagcacggcagaggaaaggaag

SEQ ID NO: 874 - DNA, 40 bp, Artificial Sequence
  Synthetic
cctgaaccgtatatcctatggccctgactggaaggatttc

SEQ ID NO: 875 - DNA, 40 bp, Artificial Sequence
  Synthetic
aaccgtatatctatcctatggccctgactggaaggatttc

SEQ ID NO: 876 - DNA, 40 bp, Artificial Sequence
  Synthetic
aaccgtatatctatcctattgccctgactggaaggatttc

SEQ ID NO: 877 - DNA, 40 bp, Artificial Sequence
  Synthetic
aaccgtatatctatcctatgtccctgactggaaggatttc

SEQ ID NO: 878 - DNA, 40 bp, Artificial Sequence
  Synthetic
aaccgtatatctatcctatggccctgactggaaggctttc

SEQ ID NO: 879 - DNA, 40 bp, Artificial Sequence
  Synthetic
aaccgtatatctatcctctggccctgactggaaggatttc

SEQ ID NO: 880 - DNA, 40 bp, Artificial Sequence
  Synthetic
aaccgtatatctatcctctggccctgactggaaggctttc

SEQ ID NO: 881 - DNA, 40 bp, Artificial Sequence
  Synthetic
caccatggtgcacctgactcctgaggagaagtctgccgtt

SEQ ID NO: 882 - DNA, 40 bp, Artificial Sequence
  Synthetic
caccatggtgcacctgactcctgtggagaagtctgccgtt

SEQ ID NO: 883 - DNA, 40 bp, Artificial Sequence
  Synthetic
caccatggcgcacctgactcctgtggagaagtctgccgtt

SEQ ID NO: 884 - DNA, 40 bp, Artificial Sequence
  Synthetic
caccatggtgcacctgactcctgtggagaagtctgtcgtt

SEQ ID NO: 885 - DNA, 29 bp, Artificial Sequence
  Synthetic
  misc_feature (5)..(24): n is a, c, g, or t
caccnnnnnnnnnnnnnnnnnnnngtttt

SEQ ID NO: 886 - DNA, 29 bp, Artificial Sequence
  Synthetic
  misc_feature (10)..(29): n is a, c, g, or t
ctctaaaacnnnnnnnnnnnnnnnnnnnn

SEQ ID NO: 887 - DNA, 67 bp, Artificial Sequence
  Synthetic
agagctagaaatagcaagttaaaataaggctagtccgttatcaacttgaaaaagtggcaccgagtcg

SEQ ID NO: 888 - DNA, 67 bp, Artificial Sequence
  Synthetic
gcaccgactcggtgccactttttcaagttgataacggactagccttattttaacttgctatttctag

SEQ ID NO: 889 - DNA, 34 bp, Artificial Sequence
  Synthetic
  misc_feature (5)..(34): n is a, c, g, or t
gtgcnnnnnnnnnnnnnnnnnnnnnnnnnnnnnn

SEQ ID NO: 890 - DNA, 34 bp, Artificial Sequence
  Synthetic
  misc_feature (5)..(34): n is a, c, g, or t
aaaannnnnnnnnnnnnnnnnnnnnnnnnnnnnn

SEQ ID NO: 891 - DNA, 104 bp, Artificial Sequence
  Synthetic
cagaggaccgactcggtcccactttttcaagttgataacggactagccttattttaacttgctatttctagctctaaaactcacgtgctcagtctgggccggtg

SEQ ID NO: 892 - DNA, 105 bp, Artificial Sequence
  Synthetic
atcacgcaccgactcggtgccactttttcaagttgataacggactagccttattttaacttgctatttctagctctaaaacttcttcttctgctcggactcggtg

SEQ ID NO: 893 - DNA, 105 bp, Artificial Sequence
  Synthetic
tttccgcaccgactcggtgccactttttcaagttgataacggactagccttattttaacttgctatttctagctctaaaacggtgctgcagaagggattccggtg

SEQ ID NO: 894 - DNA, 105 bp, Artificial Sequence
  Synthetic
tcgttgcaccgactcggtgccactttttcaagttgataacggactagccttattttaacttgctatttctagctctaaaaccaggtaatgactaagatgacggtg

SEQ ID NO: 895 - DNA, 75 bp, Artificial Sequence
  Synthetic
tccttggggcccagactgagcacgtgatggcagaggaaaggaagccctgcttcctccagagggcgtcgcaggaca

SEQ ID NO: 896 - protein, 24 aa, Artificial Sequence
  Synthetic
SLGPRLSTWQRKGSPASSRGRRRT

SEQ ID NO: 897 - DNA, 75 bp, Artificial Sequence
  Synthetic
tgtcctgcgacgccctctggaggaagcagggcttcctttcctctgccatcacgtgctcagtctgggccccaagga

SEQ ID NO: 898 - DNA, 201 bp, Artificial Sequence
  Synthetic
tattattactctatgttctatttaagttttcatgttctaaaaatgtatcccagtttacacgtctcatatgccccttggcagtcatcttagtcattacctgaggtgttcgttgtaactcatataaactgagttcccatgttttgcttaatggttgagttccgtttgtctgcacagcctgagacattgctggaaataaagaag

SEQ ID NO: 899 - DNA, 201 bp, Artificial Sequence
  Synthetic
cttctttatttccagcaatgtctcaggctgtgcagacaaacggaactcaaccattaagcaaaacatgggaactcagtttatatgagttacaacgaacacctcaggtaatgactaagatgactgccaaggggcatatgagacgtgtaaactgggatacatttttagaacatgaaaacttaaatagaacatagagtaataata

SEQ ID NO: 900 - skipped

SEQ ID NO: 901 - DNA, 29 bp, Artificial Sequence
  Synthetic
aacgaacaccgcaggtaatgactaagatg

SEQ ID NO: 902 - DNA, 44 bp, Artificial Sequence
  Synthetic
cgcggttctatctagttacgcgttaaaccaactagaaggcggtt

SEQ ID NO: 903 - RNA, 126 nt, Artificial Sequence
  Synthetic
  misc_feature (99)..(123): n is a, c, g, or u
gaaggcaauaaugcuaauuacaguuuuagagcuagaaauagcaaguuaaaauaaggcuaguccguuaucaacuugaaaaaguggcaccgaguaggugcnnnnnnnnnnnnnnnnnnnnnnnnnuuu

SEQ ID NO: 904 - RNA, 135 nt, Artificial Sequence
  Synthetic
  misc_feature (99)..(123): n is a, c, g, or u
  misc_feature (128)..(132): n is a, c, g, or u
gaaggcaauaaugcuaauuacaguuuuagagcuagaaauagcaaguuaaaauaaggcuaguccguuaucaacuugaaaaaguggcaccgaguaggugcnnnnnnnnnnnnnnnnnnnnnnnnngaaannnnnuuu

SEQ ID NO: 905 - DNA, 191 bp, Artificial Sequence
  Synthetic
gattcctggtgccagaaacagttttagagctagaaatagcaagttaaaataaggctagtccgttatcaacttgaaaaagtggcaccgagtcggtgctagttctgcccttctggcaccaggacctcttctgggtcaggagccccccccctgaacccaggataaccctcaaagtcggggggcaaccctttttt

SEQ ID NO: 906 - DNA, 201 bp, Artificial Sequence
  Synthetic
gattcctggtgccagaaacagttttagagctagaaatagcaagttaaaataaggctagtccgttatcaacttgaaaaagtggcaccgagtcggtgctgctaaggactagttctgcccttctggcaccaggacctcttctgggtcaggagccccccccctgaacccaggataaccctcaaagtcggggggcaaccctttttt

SEQ ID NO: 907 - DNA, 211 bp, Artificial Sequence
  Synthetic
gattcctggtgccagaaacagttttagagctagaaatagcaagttaaaataaggctagtccgttatcaacttgaaaaagtggcaccgagtcggtgcaggaggaagctgctaaggactagttctgcccttctggcaccaggacctcttctgggtcaggagccccccccctgaacccaggataaccctcaaagtcggggggcaaccctttttt

SEQ ID NO: 908 - DNA, 129 bp, Artificial Sequence
  Synthetic
ggcccagactgagcacgtgagttttagagctagaaatagcaagttaaaataaggctagtccgttatcaacttgaaaaagtggcaccgagtcggtgcgaagcagggcttcccgtgctcagtctgtttttt

SEQ ID NO: 909 - DNA, 140 bp, Artificial Sequence
  Synthetic
ggcccagactgagcacgtgagttttagagctagaaatagcaagttaaaataaggctagtccgttatcaacttgaaaaagtggcaccgagtcggtgcgccctctggaggaagcagggcttcccgtgctcagtctgtttttt

SEQ ID NO: 910 - DNA, 137 bp, Artificial Sequence
  Synthetic
ggcccagactgagcacgtgagttttagagctagaaatagcaagttaaaataaggctagtccgttatcaacttgaaaaagtggcaccgagtcggtgcgaagcagggcttcccgtgctcagtctgtctctctctttttt

SEQ ID NO: 911 - DNA, 148 bp, Artificial Sequence
  Synthetic
ggcccagactgagcacgtgagttttagagctagaaatagcaagttaaaataaggctagtccgttatcaacttgaaaaagtggcaccgagtcggtgcgccctctggaggaagcagggcttcccgtgctcagtctgtctctctctttttt

SEQ ID NO: 912 - DNA, 157 bp, Artificial Sequence
  Synthetic
ggcccagactgagcacgtgagttttagagctagaaatagcaagttaaaataaggctagtccgttatcaacttgaaaaagtggcaccgagtcggtgctcctgcgacgccctctggaggaagcagggcttcccgtgctcagtctgtctctctctttttt

SEQ ID NO: 913 - DNA, 179 bp, Artificial Sequence
  Synthetic
ggcccagactgagcacgtgagttttagagctagaaatagcaagttaaaataaggctagtccgttatcaacttgaaaaagtggcaccgagtcggtgcgaagcagggcttcccgtgctcagtctgtctctctcttgacgcggttctatctagttacgcgttaaaccaactagaaatttttt

SEQ ID NO: 914 - DNA, 193 bp, Artificial Sequence
  Synthetic
ggcccagactgagcacgtgagttttagagctagaaatagcaagttaaaataaggctagtccgttatcaacttgaaaaagtggcaccgagtcggtgcgaagcagggcttcccgtgctcagtctgtctctctcgggtcaggagccccccccctgaacccaggataaccctcaaagtcggggggcaaccctttttt

SEQ ID NO: 915 - DNA, 204 bp, Artificial Sequence
  Synthetic
ggcccagactgagcacgtgagttttagagctagaaatagcaagttaaaataaggctagtccgttatcaacttgaaaaagtggcaccgagtcggtgcgccctctggaggaagcagggcttcccgtgctcagtctgtctctctcgggtcaggagccccccccctgaacccaggataaccctcaaagtcggggggcaaccctttttt

SEQ ID NO: 916 - DNA, 213 bp, Artificial Sequence
  Synthetic
ggcccagactgagcacgtgagttttagagctagaaatagcaagttaaaataaggctagtccgttatcaacttgaaaaagtggcaccgagtcggtgctcctgcgacgccctctggaggaagcagggcttcccgtgctcagtctgtctctctcgggtcaggagccccccccctgaacccaggataaccctcaaagtcggggggcaaccctttttt

SEQ ID NO: 917 - DNA, 132 bp, Artificial Sequence
  Synthetic
gcattttcaggaggaagcgagttttagagctagaaatagcaagttaaaataaggctagtccgttatcaacttgaaaaagtggcaccgagtcggtgctgtctgaagcaatcgcttcctcctgaaaattttttt

SEQ ID NO: 918 - DNA, 142 bp, Artificial Sequence
  Synthetic
gcattttcaggaggaagcgagttttagagctagaaatagcaagttaaaataaggctagtccgttatcaacttgaaaaagtggcaccgagtcggtgctcaaatatgctgtctgaagcaatcgcttcctcctgaaaattttttt

SEQ ID NO: 919 - DNA, 152 bp, Artificial Sequence
  Synthetic
gcattttcaggaggaagcgagttttagagctagaaatagcaagttaaaataaggctagtccgttatcaacttgaaaaagtggcaccgagtcggtgcaggaaatgactcaaatatgctgtctgaagcaatcgcttcctcctgaaaattttttt

SEQ ID NO: 920 - DNA, 140 bp, Artificial Sequence
  Synthetic
gcattttcaggaggaagcgagttttagagctagaaatagcaagttaaaataaggctagtccgttatcaacttgaaaaagtggcaccgagtcggtgctgtctgaagcaatcgcttcctcctgaaaataactctcttttttt

SEQ ID NO: 921 - DNA, 150 bp, Artificial Sequence
  Synthetic
gcattttcaggaggaagcgagttttagagctagaaatagcaagttaaaataaggctagtccgttatcaacttgaaaaagtggcaccgagtcggtgctcaaatatgctgtctgaagcaatcgcttcctcctgaaaataactctcttttttt

SEQ ID NO: 922 - DNA, 160 bp, Artificial Sequence
  Synthetic
gcattttcaggaggaagcgagttttagagctagaaatagcaagttaaaataaggctagtccgttatcaacttgaaaaagtggcaccgagtcggtgcaggaaatgactcaaatatgctgtctgaagcaatcgcttcctcctgaaaataactctcttttttt

SEQ ID NO: 923 - DNA, 192 bp, Artificial Sequence
  Synthetic
gcattttcaggaggaagcgagttttagagctagaaatagcaagttaaaataaggctagtccgttatcaacttgaaaaagtggcaccgagtcggtgctcaaatatgctgtctgaagcaatcgcttcctcctgaaaataactctctttgacgcggttctatctagttacgcgttaaaccaactagaaatttttt

SEQ ID NO: 924 - DNA, 202 bp, Artificial Sequence
  Synthetic
gcattttcaggaggaagcgagttttagagctagaaatagcaagttaaaataaggctagtccgttatcaacttgaaaaagtggcaccgagtcggtgcaggaaatgactcaaatatgctgtctgaagcaatcgcttcctcctgaaaataactctctttgacgcggttctatctagttacgcgttaaaccaactagaaatttttt

SEQ ID NO: 925 - DNA, 196 bp, Artificial Sequence
  Synthetic
gcattttcaggaggaagcgagttttagagctagaaatagcaagttaaaataaggctagtccgttatcaacttgaaaaagtggcaccgagtcggtgctgtctgaagcaatcgcttcctcctgaaaataactctctgggtcaggagccccccccctgaacccaggataaccctcaaagtcggggggcaaccctttttt

SEQ ID NO: 926 - DNA, 206 bp, Artificial Sequence
  Synthetic
gcattttcaggaggaagcgagttttagagctagaaatagcaagttaaaataaggctagtccgttatcaacttgaaaaagtggcaccgagtcggtgctcaaatatgctgtctgaagcaatcgcttcctcctgaaaataactctctgggtcaggagccccccccctgaacccaggataaccctcaaagtcggggggcaaccctttttt

SEQ ID NO: 927 - DNA, 216 bp, Artificial Sequence
  Synthetic
gcattttcaggaggaagcgagttttagagctagaaatagcaagttaaaataaggctagtccgttatcaacttgaaaaagtggcaccgagtcggtgcaggaaatgactcaaatatgctgtctgaagcaatcgcttcctcctgaaaataactctctgggtcaggagccccccccctgaacccaggataaccctcaaagtcggggggcaaccctttttt

SEQ ID NO: 928 - DNA, 132 bp, Artificial Sequence
  Synthetic
gtcatcttagtcattacctggttttagagctagaaatagcaagttaaaataaggctagtccgttatcaacttgaaaaagtggcaccgagtcggtgcagtttatatgagttagtaatgactaagatgtttttt

SEQ ID NO: 929 - DNA, 142 bp, Artificial Sequence
  Synthetic
gtcatcttagtcattacctggttttagagctagaaatagcaagttaaaataaggctagtccgttatcaacttgaaaaagtggcaccgagtcggtgcatgggaactcagtttatatgagttagtaatgactaagatgtttttt

SEQ ID NO: 930 - DNA, 140 bp, Artificial Sequence
  Synthetic
gtcatcttagtcattacctggttttagagctagaaatagcaagttaaaataaggctagtccgttatcaacttgaaaaagtggcaccgagtcggtgcagtttatatgagttagtaatgactaagatgtcatctcttttttt

SEQ ID NO: 931 - DNA, 150 bp, Artificial Sequence
  Synthetic
gtcatcttagtcattacctggttttagagctagaaatagcaagttaaaataaggctagtccgttatcaacttgaaaaagtggcaccgagtcggtgcatgggaactcagtttatatgagttagtaatgactaagatgtcatctcttttttt

SEQ ID NO: 932 - DNA, 160 bp, Artificial Sequence
  Synthetic
gtcatcttagtcattacctggttttagagctagaaatagcaagttaaaataaggctagtccgttatcaacttgaaaaagtggcaccgagtcggtgctaagcaaaacatgggaactcagtttatatgagttagtaatgactaagatgtcatctcttttttt

SEQ ID NO: 933 - DNA, 182 bp, Artificial Sequence
  Synthetic
gtcatcttagtcattacctggttttagagctagaaatagcaagttaaaataaggctagtccgttatcaacttgaaaaagtggcaccgagtcggtgcagtttatatgagttagtaatgactaagatgtcatctctttgacgcggttctatctagttacgcgttaaaccaactagaaatttttt

SEQ ID NO: 934 - DNA, 192 bp, Artificial Sequence
  Synthetic
gtcatcttagtcattacctggttttagagctagaaatagcaagttaaaataaggctagtccgttatcaacttgaaaaagtggcaccgagtcggtgcatgggaactcagtttatatgagttagtaatgactaagatgtcatctctttgacgcggttctatctagttacgcgttaaaccaactagaaatttttt

SEQ ID NO: 935 - DNA, 196 bp, Artificial Sequence
  Synthetic
gtcatcttagtcattacctggttttagagctagaaatagcaagttaaaataaggctagtccgttatcaacttgaaaaagtggcaccgagtcggtgcagtttatatgagttagtaatgactaagatgtcatctctgggtcaggagccccccccctgaacccaggataaccctcaaagtcggggggcaaccctttttt

SEQ ID NO: 936 - DNA, 206 bp, Artificial Sequence
  Synthetic
gtcatcttagtcattacctggttttagagctagaaatagcaagttaaaataaggctagtccgttatcaacttgaaaaagtggcaccgagtcggtgcatgggaactcagtttatatgagttagtaatgactaagatgtcatctctgggtcaggagccccccccctgaacccaggataaccctcaaagtcggggggcaaccctttttt

SEQ ID NO: 937 - DNA, 216 bp, Artificial Sequence
  Synthetic
gtcatcttagtcattacctggttttagagctagaaatagcaagttaaaataaggctagtccgttatcaacttgaaaaagtggcaccgagtcggtgctaagcaaaacatgggaactcagtttatatgagttagtaatgactaagatgtcatctctgggtcaggagccccccccctgaacccaggataaccctcaaagtcggggggcaaccctttttt

SEQ ID NO: 938 - DNA, 141 bp, Artificial Sequence
  Synthetic
gtcatcttagtcattacctggttttagagctagaaatagcaagttaaaataaggctagtccgttatcaacttgaaaaagtggcaccgagtcggtgctatgagttacaacgaacacctcatgtaatgactaagatgtttttt

SEQ ID NO: 939 - DNA, 151 bp, Artificial Sequence
  Synthetic
gtcatcttagtcattacctggttttagagctagaaatagcaagttaaaataaggctagtccgttatcaacttgaaaaagtggcaccgagtcggtgcactcagtttatatgagttacaacgaacacctcatgtaatgactaagatgtttttt

SEQ ID NO: 940 - DNA, 139 bp, Artificial Sequence
  Synthetic
gtcatcttagtcattacctggttttagagctagaaatagcaagttaaaataaggctagtccgttatcaacttgaaaaagtggcaccgagtcggtgcaacgaacacctcatgtaatgactaagatgtcatctcttttttt

SEQ ID NO: 941 - DNA, 149 bp, Artificial Sequence
  Synthetic
gtcatcttagtcattacctggttttagagctagaaatagcaagttaaaataaggctagtccgttatcaacttgaaaaagtggcaccgagtcggtgctatgagttacaacgaacacctcatgtaatgactaagatgtcatctcttttttt

SEQ ID NO: 942 - DNA, 159 bp, Artificial Sequence
  Synthetic
gtcatcttagtcattacctggttttagagctagaaatagcaagttaaaataaggctagtccgttatcaacttgaaaaagtggcaccgagtcggtgcactcagtttatatgagttacaacgaacacctcatgtaatgactaagatgtcatctcttttttt

SEQ ID NO: 943 - DNA, 191 bp, Artificial Sequence
  Synthetic
gtcatcttagtcattacctggttttagagctagaaatagcaagttaaaataaggctagtccgttatcaacttgaaaaagtggcaccgagtcggtgctatgagttacaacgaacacctcatgtaatgactaagatgtcatctctttgacgcggttctatctagttacgcgttaaaccaactagaaatttttt

SEQ ID NO: 944 - DNA, 201 bp, Artificial Sequence
  Synthetic
gtcatcttagtcattacctggttttagagctagaaatagcaagttaaaataaggctagtccgttatcaacttgaaaaagtggcaccgagtcggtgcactcagtttatatgagttacaacgaacacctcatgtaatgactaagatgtcatctctttgacgcggttctatctagttacgcgttaaaccaactagaaatttttt

SEQ ID NO: 945 - DNA, 205 bp, Artificial Sequence
  Synthetic
gtcatcttagtcattacctggttttagagctagaaatagcaagttaaaataaggctagtccgttatcaacttgaaaaagtggcaccgagtcggtgctatgagttacaacgaacacctcatgtaatgactaagatgtcatctctgggtcaggagccccccccctgaacccaggataaccctcaaagtcggggggcaaccctttttt

SEQ ID NO: 946 - DNA, 215 bp, Artificial Sequence
  Synthetic
gtcatcttagtcattacctggttttagagctagaaatagcaagttaaaataaggctagtccgttatcaacttgaaaaagtggcaccgagtcggtgcactcagtttatatgagttacaacgaacacctcatgtaatgactaagatgtcatctctgggtcaggagccccccccctgaacccaggataaccctcaaagtcggggggcaaccctttttt

SEQ ID NO: 947 - DNA, 132 bp, Artificial Sequence
  Synthetic
ggaatcccttctgcagcaccgttttagagctagaaatagcaagttaaaataaggctagtccgttatcaacttgaaaaagtggcaccgagtcggtgcggaaaagcgatcaaggtgctgcagaagggatttttt

SEQ ID NO: 948 - DNA, 143 bp, Artificial Sequence
  Synthetic
ggaatcccttctgcagcaccgttttagagctagaaatagcaagttaaaataaggctagtccgttatcaacttgaaaaagtggcaccgagtcggtgcgccagaagctcggaaaagcgatcaaggtgctgcagaagggatttttt

SEQ ID NO: 949 - DNA, 153 bp, Artificial Sequence
  Synthetic
ggaatcccttctgcagcaccgttttagagctagaaatagcaagttaaaataaggctagtccgttatcaacttgaaaaagtggcaccgagtcggtgcgcttgagaccgccagaagctcggaaaagcgatcaaggtgctgcagaagggatttttt

SEQ ID NO: 950 - DNA, 140 bp, Artificial Sequence
  Synthetic
ggaatcccttctgcagcaccgttttagagctagaaatagcaagttaaaataaggctagtccgttatcaacttgaaaaagtggcaccgagtcggtgcggaaaagcgatcaaggtgctgcagaagggacaatcacttttttt

SEQ ID NO: 951 - DNA, 151 bp, Artificial Sequence
  Synthetic
ggaatcccttctgcagcaccgttttagagctagaaatagcaagttaaaataaggctagtccgttatcaacttgaaaaagtggcaccgagtcggtgcgccagaagctcggaaaagcgatcaaggtgctgcagaagggacaatcacttttttt

SEQ ID NO: 952 - DNA, 161 bp, Artificial Sequence
  Synthetic
ggaatcccttctgcagcaccgttttagagctagaaatagcaagttaaaataaggctagtccgttatcaacttgaaaaagtggcaccgagtcggtgcgcttgagaccgccagaagctcggaaaagcgatcaaggtgctgcagaagggacaatcacttttttt

SEQ ID NO: 953 - DNA, 182 bp, Artificial Sequence
  Synthetic
ggaatcccttctgcagcaccgttttagagctagaaatagcaagttaaaataaggctagtccgttatcaacttgaaaaagtggcaccgagtcggtgcggaaaagcgatcaaggtgctgcagaagggacaatcactttgacgcggttctatctagttacgcgttaaaccaactagaaatttttt

SEQ ID NO: 954 - DNA, 193 bp, Artificial Sequence
  Synthetic
ggaatcccttctgcagcaccgttttagagctagaaatagcaagttaaaataaggctagtccgttatcaacttgaaaaagtggcaccgagtcggtgcgccagaagctcggaaaagcgatcaaggtgctgcagaagggacaatcactttgacgcggttctatctagttacgcgttaaaccaactagaaatttttt

SEQ ID NO: 955 - DNA, 203 bp, Artificial Sequence
  Synthetic
ggaatcccttctgcagcaccgttttagagctagaaatagcaagttaaaataaggctagtccgttatcaacttgaaaaagtggcaccgagtcggtgcgcttgagaccgccagaagctcggaaaagcgatcaaggtgctgcagaagggacaatcactttgacgcggttctatctagttacgcgttaaaccaactagaaatttttt

SEQ ID NO: 956 - DNA, 196 bp, Artificial Sequence
  Synthetic
ggaatcccttctgcagcaccgttttagagctagaaatagcaagttaaaataaggctagtccgttatcaacttgaaaaagtggcaccgagtcggtgcggaaaagcgatcaaggtgctgcagaagggacaatcactgggtcaggagccccccccctgaacccaggataaccctcaaagtcggggggcaaccctttttt

SEQ ID NO: 957 - DNA, 207 bp, Artificial Sequence
  Synthetic
ggaatcccttctgcagcaccgttttagagctagaaatagcaagttaaaataaggctagtccgttatcaacttgaaaaagtggcaccgagtcggtgcgccagaagctcggaaaagcgatcaaggtgctgcagaagggacaatcactgggtcaggagccccccccctgaacccaggataaccctcaaagtcggggggcaaccctttttt

SEQ ID NO: 958 - DNA, 217 bp, Artificial Sequence
  Synthetic
ggaatcccttctgcagcaccgttttagagctagaaatagcaagttaaaataaggctagtccgttatcaacttgaaaaagtggcaccgagtcggtgcgcttgagaccgccagaagctcggaaaagcgatcaaggtgctgcagaagggacaatcactgggtcaggagccccccccctgaacccaggataaccctcaaagtcggggggcaaccctttttt

SEQ ID NO: 959 - DNA, 132 bp, Artificial Sequence
  Synthetic
ggaatcccttctgcagcaccgttttagagctagaaatagcaagttaaaataaggctagtccgttatcaacttgaaaaagtggcaccgagtcggtgcgaccgccagaagctcgggctgcagaagggatttttt

SEQ ID NO: 960 - DNA, 142 bp, Artificial Sequence
  Synthetic
ggaatcccttctgcagcaccgttttagagctagaaatagcaagttaaaataaggctagtccgttatcaacttgaaaaagtggcaccgagtcggtgctagtgcttgagaccgccagaagctcgggctgcagaagggatttttt

SEQ ID NO: 961 - DNA, 151 bp, Artificial Sequence
  Synthetic
ggaatcccttctgcagcaccgttttagagctagaaatagcaagttaaaataaggctagtccgttatcaacttgaaaaagtggcaccgagtcggtgctgacgtaggtagtgcttgagaccgccagaagctcgggctgcagaagggatttttt

SEQ ID NO: 962 - DNA, 140 bp, Artificial Sequence
  Synthetic
ggaatcccttctgcagcaccgttttagagctagaaatagcaagttaaaataaggctagtccgttatcaacttgaaaaagtggcaccgagtcggtgcgaccgccagaagctcgggctgcagaagggacaatcacttttttt

SEQ ID NO: 963 - DNA, 150 bp, Artificial Sequence
  Synthetic
ggaatcccttctgcagcaccgttttagagctagaaatagcaagttaaaataaggctagtccgttatcaacttgaaaaagtggcaccgagtcggtgctagtgcttgagaccgccagaagctcgggctgcagaagggacaatcacttttttt

SEQ ID NO: 964 - DNA, 159 bp, Artificial Sequence
  Synthetic
ggaatcccttctgcagcaccgttttagagctagaaatagcaagttaaaataaggctagtccgttatcaacttgaaaaagtggcaccgagtcggtgctgacgtaggtagtgcttgagaccgccagaagctcgggctgcagaagggacaatcacttttttt

SEQ ID NO: 965 - DNA, 182 bp, Artificial Sequence
  Synthetic
ggaatcccttctgcagcaccgttttagagctagaaatagcaagttaaaataaggctagtccgttatcaacttgaaaaagtggcaccgagtcggtgcgaccgccagaagctcgggctgcagaagggacaatcactttgacgcggttctatctagttacgcgttaaaccaactagaaatttttt

SEQ ID NO: 966 - DNA, 201 bp, Artificial Sequence
  Synthetic
ggaatcccttctgcagcaccgttttagagctagaaatagcaagttaaaataaggctagtccgttatcaacttgaaaaagtggcaccgagtcggtgctgacgtaggtagtgcttgagaccgccagaagctcgggctgcagaagggacaatcactttgacgcggttctatctagttacgcgttaaaccaactagaaatttttt

SEQ ID NO: 967 - DNA, 196 bp, Artificial Sequence
  Synthetic
ggaatcccttctgcagcaccgttttagagctagaaatagcaagttaaaataaggctagtccgttatcaacttgaaaaagtggcaccgagtcggtgcgaccgccagaagctcgggctgcagaagggacaatcactgggtcaggagccccccccctgaacccaggataaccctcaaagtcggggggcaaccctttttt

SEQ ID NO: 968 - DNA, 206 bp, Artificial Sequence
  Synthetic
ggaatcccttctgcagcaccgttttagagctagaaatagcaagttaaaataaggctagtccgttatcaacttgaaaaagtggcaccgagtcggtgctagtgcttgagaccgccagaagctcgggctgcagaagggacaatcactgggtcaggagccccccccctgaacccaggataaccctcaaagtcggggggcaaccctttttt

SEQ ID NO: 969 - DNA, 215 bp, Artificial Sequence
  Synthetic
ggaatcccttctgcagcaccgttttagagctagaaatagcaagttaaaataaggctagtccgttatcaacttgaaaaagtggcaccgagtcggtgctgacgtaggtagtgcttgagaccgccagaagctcgggctgcagaagggacaatcactgggtcaggagccccccccctgaacccaggataaccctcaaagtcggggggcaaccctttttt

SEQ ID NO: 970 - DNA, 132 bp, Artificial Sequence
  Synthetic
gagtccgagcagaagaagaagttttagagctagaaatagcaagttaaaataaggctagtccgttatcaacttgaaaaagtggcaccgagtcggtgcgtgatgggagcacttcttcttctgctcggatttttt

SEQ ID NO: 971 - DNA, 142 bp, Artificial Sequence
  Synthetic
gagtccgagcagaagaagaagttttagagctagaaatagcaagttaaaataaggctagtccgttatcaacttgaaaaagtggcaccgagtcggtgcaccggttgatgtgatgggagcacttcttcttctgctcggatttttt

SEQ ID NO: 972 - DNA, 152 bp, Artificial Sequence
  Synthetic
gagtccgagcagaagaagaagttttagagctagaaatagcaagttaaaataaggctagtccgttatcaacttgaaaaagtggcaccgagtcggtgcgcaatgcgccaccggttgatgtgatgggagcacttcttcttctgctcggatttttt

SEQ ID NO: 973 - DNA, 140 bp, Artificial Sequence
  Synthetic
gagtccgagcagaagaagaagttttagagctagaaatagcaagttaaaataaggctagtccgttatcaacttgaaaaagtggcaccgagtcggtgcgtgatgggagcacttcttcttctgctcggaaacaatcttttttt

SEQ ID NO: 974 - DNA, 150 bp, Artificial Sequence
  Synthetic
gagtccgagcagaagaagaagttttagagctagaaatagcaagttaaaataaggctagtccgttatcaacttgaaaaagtggcaccgagtcggtgcaccggttgatgtgatgggagcacttcttcttctgctcggaaacaatcttttttt

SEQ ID NO: 975 - DNA, 160 bp, Artificial Sequence
  Synthetic
gagtccgagcagaagaagaagttttagagctagaaatagcaagttaaaataaggctagtccgttatcaacttgaaaaagtggcaccgagtcggtgcgcaatgcgccaccggttgatgtgatgggagcacttcttcttctgctcggaaacaatcttttttt

SEQ ID NO: 976 - DNA, 192 bp, Artificial Sequence
  Synthetic
gagtccgagcagaagaagaagttttagagctagaaatagcaagttaaaataaggctagtccgttatcaacttgaaaaagtggcaccgagtcggtgcaccggttgatgtgatgggagcacttcttcttctgctcggaaacaatctttgacgcggttctatctagttacgcgttaaaccaactagaaatttttt

SEQ ID NO: 977 - DNA, 202 bp, Artificial Sequence
  Synthetic
gagtccgagcagaagaagaagttttagagctagaaatagcaagttaaaataaggctagtccgttatcaacttgaaaaagtggcaccgagtcggtgcgcaatgcgccaccggttgatgtgatgggagcacttcttcttctgctcggaaacaatctttgacgcggttctatctagttacgcgttaaaccaactagaaatttttt

SEQ ID NO: 978 - DNA, 196 bp, Artificial Sequence
  Synthetic
gagtccgagcagaagaagaagttttagagctagaaatagcaagttaaaataaggctagtccgttatcaacttgaaaaagtggcaccgagtcggtgcgtgatgggagcacttcttcttctgctcggaaacaatctgggtcaggagccccccccctgaacccaggataaccctcaaagtcggggggcaaccctttttt

SEQ ID NO: 979 - DNA, 206 bp, Artificial Sequence
  Synthetic
gagtccgagcagaagaagaagttttagagctagaaatagcaagttaaaataaggctagtccgttatcaacttgaaaaagtggcaccgagtcggtgcaccggttgatgtgatgggagcacttcttcttctgctcggaaacaatctgggtcaggagccccccccctgaacccaggataaccctcaaagtcggggggcaaccctttttt

SEQ ID NO: 980 - DNA, 216 bp, Artificial Sequence
  Synthetic
gagtccgagcagaagaagaagttttagagctagaaatagcaagttaaaataaggctagtccgttatcaacttgaaaaagtggcaccgagtcggtgcgcaatgcgccaccggttgatgtgatgggagcacttcttcttctgctcggaaacaatctgggtcaggagccccccccctgaacccaggataaccctcaaagtcggggggcaaccctttttt

SEQ ID NO: 981 - DNA, 132 bp, Artificial Sequence
  Synthetic
gagtccgagcagaagaagaagttttagagctagaaatagcaagttaaaataaggctagtccgttatcaacttgaaaaagtggcaccgagtcggtgcgcgccaccggttgatgttcttctgctcggatttttt

SEQ ID NO: 982 - DNA, 152 bp, Artificial Sequence
  Synthetic
gagtccgagcagaagaagaagttttagagctagaaatagcaagttaaaataaggctagtccgttatcaacttgaaaaagtggcaccgagtcggtgcttggcctgcttcgtggcaatgcgccaccggttgatgttcttctgctcggatttttt

SEQ ID NO: 983 - DNA, 140 bp, Artificial Sequence
  Synthetic
gagtccgagcagaagaagaagttttagagctagaaatagcaagttaaaataaggctagtccgttatcaacttgaaaaagtggcaccgagtcggtgcgcgccaccggttgatgttcttctgctcggaaacaatcttttttt

SEQ ID NO: 984 - DNA, 160 bp, Artificial Sequence
  Synthetic
gagtccgagcagaagaagaagttttagagctagaaatagcaagttaaaataaggctagtccgttatcaacttgaaaaagtggcaccgagtcggtgcttggcctgcttcgtggcaatgcgccaccggttgatgttcttctgctcggaaacaatcttttttt

SEQ ID NO: 985 - DNA, 182 bp, Artificial Sequence
  Synthetic
gagtccgagcagaagaagaagttttagagctagaaatagcaagttaaaataaggctagtccgttatcaacttgaaaaagtggcaccgagtcggtgcgcgccaccggttgatgttcttctgctcggaaacaatctttgacgcggttctatctagttacgcgttaaaccaactagaaatttttt

SEQ ID NO: 986 - DNA, 202 bp, Artificial Sequence
  Synthetic
gagtccgagcagaagaagaagttttagagctagaaatagcaagttaaaataaggctagtccgttatcaacttgaaaaagtggcaccgagtcggtgcttggcctgcttcgtggcaatgcgccaccggttgatgttcttctgctcggaaacaatctttgacgcggttctatctagttacgcgttaaaccaactagaaatttttt

SEQ ID NO: 987 - DNA, 196 bp, Artificial Sequence
  Synthetic
gagtccgagcagaagaagaagttttagagctagaaatagcaagttaaaataaggctagtccgttatcaacttgaaaaagtggcaccgagtcggtgcgcgccaccggttgatgttcttctgctcggaaacaatctgggtcaggagccccccccctgaacccaggataaccctcaaagtcggggggcaaccctttttt

SEQ ID NO: 988 - DNA, 216 bp, Artificial Sequence
  Synthetic
gagtccgagcagaagaagaagttttagagctagaaatagcaagttaaaataaggctagtccgttatcaacttgaaaaagtggcaccgagtcggtgcttggcctgcttcgtggcaatgcgccaccggttgatgttcttctgctcggaaacaatctgggtcaggagccccccccctgaacccaggataaccctcaaagtcggggggcaaccctttttt

SEQ ID NO: 989 - DNA, 137 bp, Artificial Sequence
  Synthetic
gatgtctgcaggccagatgagttttagagctagaaatagcaagttaaaataaggctagtccgttatcaacttgaaaaagtggcaccgagtcggtgcaatgtgccatctggagcactcatctggcctgcagatttttt

SEQ ID NO: 990 - DNA, 145 bp, Artificial Sequence
  Synthetic
gatgtctgcaggccagatgagttttagagctagaaatagcaagttaaaataaggctagtccgttatcaacttgaaaaagtggcaccgagtcggtgcaatgtgccatctggagcactcatctggcctgcagaacaatctctttttt

SEQ ID NO: 991 - DNA, 187 bp, Artificial Sequence
  Synthetic
gatgtctgcaggccagatgagttttagagctagaaatagcaagttaaaataaggctagtccgttatcaacttgaaaaagtggcaccgagtcggtgcaatgtgccatctggagcactcatctggcctgcagaacaatctcttgacgcggttctatctagttacgcgttaaaccaactagaaatttttt

SEQ ID NO: 992 - DNA, 205 bp, Artificial Sequence
  Synthetic
gatgtctgcaggccagatgagttttagagctagaaatagcaagttaaaataaggctagtccgttatcaacttgaaaaagtggcaccgagtcggtgcaatgtgccatctggagcactcatctggcctgcagaacaatctcgtcagggtcaggagccccccccctgcacccaggaaaaccctcaaagtcggggggcaaccctttttt

SEQ ID NO: 993 - DNA, 137 bp, Artificial Sequence
  Synthetic
gatgtctgcaggccagatgagttttagagctagaaatagcaagttaaaataaggctagtccgttatcaacttgaaaaagtggcaccgagtcggtgcgtgtgtccctctgacaatgtgctctggcctgcagatttttt

SEQ ID NO: 994 - DNA, 145 bp, Artificial Sequence
  Synthetic
gatgtctgcaggccagatgagttttagagctagaaatagcaagttaaaataaggctagtccgttatcaacttgaaaaagtggcaccgagtcggtgcgtgtgtccctctgacaatgtgctctggcctgcagaacaatctctttttt

SEQ ID NO: 995 - DNA, 205 bp, Artificial Sequence
  Synthetic
gatgtctgcaggccagatgagttttagagctagaaatagcaagttaaaataaggctagtccgttatcaacttgaaaaagtggcaccgagtcggtgcgtgtgtccctctgacaatgtgctctggcctgcagaacaatctcgtcagggtcaggagccccccccctgcacccaggaaaaccctcaaagtcggggggcaaccctttttt

SEQ ID NO: 996 - DNA, 171 bp, Artificial Sequence
  Synthetic
ggcccagactgagcacgtgagttttagagctagaaatagcaagttaaaataaggctagtccgttatcaacttgaaaaagtggcaccgagtcggtgcttcctctgccatctcgtgctcagtctgttgacgcggttctatctagttacgcgttaaaccaactagaaatttttt

SEQ ID NO: 997 - DNA, 185 bp, Artificial Sequence
  Synthetic
ggcccagactgagcacgtgagttttagagctagaaatagcaagttaaaataaggctagtccgttatcaacttgaaaaagtggcaccgagtcggtgcttcctctgccatctcgtgctcagtctggggtcaggagccccccccctgaacccaggataaccctcaaagtcggggggcaaccctttttt

SEQ ID NO: 998 - DNA, 173 bp, Artificial Sequence
  Synthetic
gtcatcttagtcattacctggttttagagctagaaatagcaagttaaaataaggctagtccgttatcaacttgaaaaagtggcaccgagtcggtgcaacgaacacctcatgtaatgactaagatgttgacgcggttctatctagttacgcgttaaaccaactagaaatttttt

SEQ ID NO: 999 - DNA, 187 bp, Artificial Sequence
  Synthetic
gtcatcttagtcattacctggttttagagctagaaatagcaagttaaaataaggctagtccgttatcaacttgaaaaagtggcaccgagtcggtgcaacgaacacctcatgtaatgactaagatggggtcaggagccccccccctgaacccaggataaccctcaaagtcggggggcaaccctttttt

SEQ ID NO: 1000 - DNA, 169 bp, Artificial Sequence
  Synthetic
gattcctggtgccagaaacagttttagagctagaaatagcaagttaaaataaggctagtccgttatcaacttgaaaaagtggcaccgagtcggtgcgtcaccactgtttctggcaccaggattgacgcggttctatctagttacgcgttaaaccaactagaaatttttt

SEQ ID NO: 1001 - DNA, 183 bp, Artificial Sequence
  Synthetic
gattcctggtgccagaaacagttttagagctagaaatagcaagttaaaataaggctagtccgttatcaacttgaaaaagtggcaccgagtcggtgcgtcaccactgtttctggcaccaggagggtcaggagccccccccctgaacccaggataaccctcaaagtcggggggcaaccctttttt

SEQ ID NO: 1002 - DNA, 174 bp, Artificial Sequence
  Synthetic
gcattttcaggaggaagcgagttttagagctagaaatagcaagttaaaataaggctagtccgttatcaacttgaaaaagtggcaccgagtcggtgctgtctgaagcaatcgcttcctcctgaaaatttgacgcggttctatctagttacgcgttaaaccaactagaaatttttt

SEQ ID NO: 1003 - DNA, 188 bp, Artificial Sequence
  Synthetic
gcattttcaggaggaagcgagttttagagctagaaatagcaagttaaaataaggctagtccgttatcaacttgaaaaagtggcaccgagtcggtgctgtctgaagcaatcgcttcctcctgaaaatgggtcaggagccccccccctgaacccaggataaccctcaaagtcggggggcaaccctttttt

SEQ ID NO: 1004 - DNA, 194 bp, Artificial Sequence
  Synthetic
ggcccagactgagcacgtgagttttagagctagaaatagcaagttaaaataaggctagtccgttatcaacttgaaaaagtggcaccgagtcggtgctggaggaagcagggcttcctttcctctgccatcacttatcgtcgtcatccttgtaatccgtgctcagtctgtctctctctggtggtggtggttttttt

SEQ ID NO: 1005 - DNA, 201 bp, Artificial Sequence
  Synthetic
ggcccagactgagcacgtgagttttagagctagaaatagcaagttaaaataaggctagtccgttatcaacttgaaaaagtggcaccgagtcggtgctggaggaagcagggcttcctttcctctgccatcacttatcgtcgtcatccttgtaatccgtgctcagtctgtctctctcgggacagggcagggacagggtttttt

SEQ ID NO: 1006 - DNA, 202 bp, Artificial Sequence
  Synthetic
ggcccagactgagcacgtgagttttagagctagaaatagcaagttaaaataaggctagtccgttatcaacttgaaaaagtggcaccgagtcggtgctggaggaagcagggcttcctttcctctgccatcacttatcgtcgtcatccttgtaatccgtgctcagtctgtctctctcgggtccgggtctgggtctgggtttttt

SEQ ID NO: 1007 - DNA, 200 bp, Artificial Sequence
  Synthetic
ggcccagactgagcacgtgagttttagagctagaaatagcaagttaaaataaggctagtccgttatcaacttgaaaaagtggcaccgagtcggtgctggaggaagcagggcttcctttcctctgccatcacttatcgtcgtcatccttgtaatccgtgctcagtctgtctctctcgggcagggtctgggctgggtttttt

SEQ ID NO: 1008 - DNA, 200 bp, Artificial Sequence
  Synthetic
ggcccagactgagcacgtgagttttagagctagaaatagcaagttaaaataaggctagtccgttatcaacttgaaaaagtggcaccgagtcggtgctggaggaagcagggcttcctttcctctgccatcacttatcgtcgtcatccttgtaatccgtgctcagtctgtctctctcgggctgggatgggaaagggtttttt

SEQ ID NO: 1009 - DNA, 200 bp, Artificial Sequence
  Synthetic
ggcccagactgagcacgtgagttttagagctagaaatagcaagttaaaataaggctagtccgttatcaacttgaaaaagtggcaccgagtcggtgctggaggaagcagggcttcctttcctctgccatcacttatcgtcgtcatccttgtaatccgtgctcagtctgtctctctcgggctctgggtgggccgggtttttt

SEQ ID NO: 1010 - DNA, 199 bp, Artificial Sequence
  Synthetic
ggcccagactgagcacgtgagttttagagctagaaatagcaagttaaaataaggctagtccgttatcaacttgaaaaagtggcaccgagtcggtgctggaggaagcagggcttcctttcctctgccatcacttatcgtcgtcatccttgtaatccgtgctcagtctgtctctctcgggctgggctgggcagggtttttt

SEQ ID NO: 1011 - DNA, 198 bp, Artificial Sequence
  Synthetic
ggcccagactgagcacgtgagttttagagctagaaatagcaagttaaaataaggctagtccgttatcaacttgaaaaagtggcaccgagtcggtgctggaggaagcagggcttcctttcctctgccatcacttatcgtcgtcatccttgtaatccgtgctcagtctgtctctctcgggtgggctgggaagggtttttt

SEQ ID NO: 1012 - DNA, 198 bp, Artificial Sequence
  Synthetic
ggcccagactgagcacgtgagttttagagctagaaatagcaagttaaaataaggctagtccgttatcaacttgaaaaagtggcaccgagtcggtgctggaggaagcagggcttcctttcctctgccatcacttatcgtcgtcatccttgtaatccgtgctcagtctgtctctctcgggagggagggctagggtttttt

SEQ ID NO: 1013 - DNA, 198 bp, Artificial Sequence
  Synthetic
ggcccagactgagcacgtgagttttagagctagaaatagcaagttaaaataaggctagtccgttatcaacttgaaaaagtggcaccgagtcggtgctggaggaagcagggcttcctttcctctgccatcacttatcgtcgtcatccttgtaatccgtgctcagtctgtctctctcgggcagggctgggagggtttttt

SEQ ID NO: 1014 - DNA, 197 bp, Artificial Sequence
  Synthetic
ggcccagactgagcacgtgagttttagagctagaaatagcaagttaaaataaggctagtccgttatcaacttgaaaaagtggcaccgagtcggtgctggaggaagcagggcttcctttcctctgccatcacttatcgtcgtcatccttgtaatccgtgctcagtctgtctctctcgggtgggagggctgggtttttt

SEQ ID NO: 1015 - DNA, 150 bp, Artificial Sequence
  Synthetic
ggcccagactgagcacgtgagttttagagctagaaatagcaagttaaaataaggctagtccgttatcaacttgaaaaagtggcaccgagtcggtgcttcctctgccatctcgtgctcagtctgtctctctctggtggtggtggttttttt

SEQ ID NO: 1016 - DNA, 157 bp, Artificial Sequence
  Synthetic
ggcccagactgagcacgtgagttttagagctagaaatagcaagttaaaataaggctagtccgttatcaacttgaaaaagtggcaccgagtcggtgcttcctctgccatctcgtgctcagtctgtctctctcgggacagggcagggacagggtttttt

SEQ ID NO: 1017 - DNA, 158 bp, Artificial Sequence
  Synthetic
ggcccagactgagcacgtgagttttagagctagaaatagcaagttaaaataaggctagtccgttatcaacttgaaaaagtggcaccgagtcggtgcttcctctgccatctcgtgctcagtctgtctctctcgggtccgggtctgggtctgggtttttt

SEQ ID NO: 1018 - DNA, 156 bp, Artificial Sequence
  Synthetic
ggcccagactgagcacgtgagttttagagctagaaatagcaagttaaaataaggctagtccgttatcaacttgaaaaagtggcaccgagtcggtgcttcctctgccatctcgtgctcagtctgtctctctcgggcagggtctgggctgggtttttt

SEQ ID NO: 1019 - DNA, 156 bp, Artificial Sequence
  Synthetic
ggcccagactgagcacgtgagttttagagctagaaatagcaagttaaaataaggctagtccgttatcaacttgaaaaagtggcaccgagtcggtgcttcctctgccatctcgtgctcagtctgtctctctcgggctgggatgggaaagggtttttt

SEQ ID NO: 1020 - DNA, 156 bp, Artificial Sequence
  Synthetic
ggcccagactgagcacgtgagttttagagctagaaatagcaagttaaaataaggctagtccgttatcaacttgaaaaagtggcaccgagtcggtgcttcctctgccatctcgtgctcagtctgtctctctcgggctctgggtgggccgggtttttt

SEQ ID NO: 1021 - DNA, 155 bp, Artificial Sequence
  Synthetic
ggcccagactgagcacgtgagttttagagctagaaatagcaagttaaaataaggctagtccgttatcaacttgaaaaagtggcaccgagtcggtgcttcctctgccatctcgtgctcagtctgtctctctcgggctgggctgggcagggtttttt

SEQ ID NO: 1022 - DNA, 154 bp, Artificial Sequence
  Synthetic
ggcccagactgagcacgtgagttttagagctagaaatagcaagttaaaataaggctagtccgttatcaacttgaaaaagtggcaccgagtcggtgcttcctctgccatctcgtgctcagtctgtctctctcgggtgggctgggaagggtttttt

SEQ ID NO: 1023 - DNA, 154 bp, Artificial Sequence
  Synthetic
ggcccagactgagcacgtgagttttagagctagaaatagcaagttaaaataaggctagtccgttatcaacttgaaaaagtggcaccgagtcggtgcttcctctgccatctcgtgctcagtctgtctctctcgggagggagggctagggtttttt

SEQ ID NO: 1024 - DNA, 154 bp, Artificial Sequence
  Synthetic
ggcccagactgagcacgtgagttttagagctagaaatagcaagttaaaataaggctagtccgttatcaacttgaaaaagtggcaccgagtcggtgcttcctctgccatctcgtgctcagtctgtctctctcgggcagggctgggagggtttttt

SEQ ID NO: 1025 - DNA, 153 bp, Artificial Sequence
  Synthetic
ggcccagactgagcacgtgagttttagagctagaaatagcaagttaaaataaggctagtccgttatcaacttgaaaaagtggcaccgagtcggtgcttcctctgccatctcgtgctcagtctgtctctctcgggtgggagggctgggtttttt

SEQ ID NO: 1026 - DNA, 161 bp, Artificial Sequence
  Synthetic
ggcccagactgagcacgtgagttttagagctagaaatagcaagttaaaataaggctagtccgttatcaacttgaaaaagtggcaccgagtcggtgcgccctctggaggaagcagggcttcccgtgctcagtctgtctctctctggtggtggtggttttttt

SEQ ID NO: 1027 - DNA, 168 bp, Artificial Sequence
  Synthetic
ggcccagactgagcacgtgagttttagagctagaaatagcaagttaaaataaggctagtccgttatcaacttgaaaaagtggcaccgagtcggtgcgccctctggaggaagcagggcttcccgtgctcagtctgtctctctcgggacagggcagggacagggtttttt

SEQ ID NO: 1028 - DNA, 169 bp, Artificial Sequence
  Synthetic
ggcccagactgagcacgtgagttttagagctagaaatagcaagttaaaataaggctagtccgttatcaacttgaaaaagtggcaccgagtcggtgcgccctctggaggaagcagggcttcccgtgctcagtctgtctctctcgggtccgggtctgggtctgggtttttt

SEQ ID NO: 1029 - DNA, 167 bp, Artificial Sequence
  Synthetic
ggcccagactgagcacgtgagttttagagctagaaatagcaagttaaaataaggctagtccgttatcaacttgaaaaagtggcaccgagtcggtgcgccctctggaggaagcagggcttcccgtgctcagtctgtctctctcgggcagggtctgggctgggtttttt

SEQ ID NO: 1030 - DNA, 167 bp, Artificial Sequence
  Synthetic
ggcccagactgagcacgtgagttttagagctagaaatagcaagttaaaataaggctagtccgttatcaacttgaaaaagtggcaccgagtcggtgcgccctctggaggaagcagggcttcccgtgctcagtctgtctctctcgggctgggatgggaaagggtttttt

SEQ ID NO: 1031 - DNA, 167 bp, Artificial Sequence
  Synthetic
ggcccagactgagcacgtgagttttagagctagaaatagcaagttaaaataaggctagtccgttatcaacttgaaaaagtggcaccgagtcggtgcgccctctggaggaagcagggcttcccgtgctcagtctgtctctctcgggctctgggtgggccgggtttttt

SEQ ID NO: 1032 - DNA, 166 bp, Artificial Sequence
  Synthetic
ggcccagactgagcacgtgagttttagagctagaaatagcaagttaaaataaggctagtccgttatcaacttgaaaaagtggcaccgagtcggtgcgccctctggaggaagcagggcttcccgtgctcagtctgtctctctcgggctgggctgggcagggtttttt

SEQ ID NO: 1033 - DNA, 165 bp, Artificial Sequence
  Synthetic
ggcccagactgagcacgtgagttttagagctagaaatagcaagttaaaataaggctagtccgttatcaacttgaaaaagtggcaccgagtcggtgcgccctctggaggaagcagggcttcccgtgctcagtctgtctctctcgggtgggctgggaagggtttttt

SEQ ID NO: 1034 - DNA, 165 bp, Artificial Sequence
  Synthetic
ggcccagactgagcacgtgagttttagagctagaaatagcaagttaaaataaggctagtccgttatcaacttgaaaaagtggcaccgagtcggtgcgccctctggaggaagcagggcttcccgtgctcagtctgtctctctcgggagggagggctagggtttttt

SEQ ID NO: 1035 - DNA, 165 bp, Artificial Sequence
  Synthetic
ggcccagactgagcacgtgagttttagagctagaaatagcaagttaaaataaggctagtccgttatcaacttgaaaaagtggcaccgagtcggtgcgccctctggaggaagcagggcttcccgtgctcagtctgtctctctcgggcagggctgggagggtttttt

SEQ ID NO: 1036 - DNA, 164 bp, Artificial Sequence
  Synthetic
ggcccagactgagcacgtgagttttagagctagaaatagcaagttaaaataaggctagtccgttatcaacttgaaaaagtggcaccgagtcggtgcgccctctggaggaagcagggcttcccgtgctcagtctgtctctctcgggtgggagggctgggtttttt

SEQ ID NO: 1037 - DNA, 184 bp, Artificial Sequence
  Synthetic
gtcatcttagtcattacctggttttagagctagaaatagcaagttaaaataaggctagtccgttatcaacttgaaaaagtggcaccgagtcggtgctgagttacaacgaacacctcagcttatcgtcgtcatccttgtaatcgtaatgactaagatgtcatctcttggtggtggtggttttttt

SEQ ID NO: 1038 - DNA, 191 bp, Artificial Sequence
  Synthetic
gtcatcttagtcattacctggttttagagctagaaatagcaagttaaaataaggctagtccgttatcaacttgaaaaagtggcaccgagtcggtgctgagttacaacgaacacctcagcttatcgtcgtcatccttgtaatcgtaatgactaagatgtcatctctgggacagggcagggacagggtttttt

SEQ ID NO: 1039 - DNA, 192 bp, Artificial Sequence
  Synthetic
gtcatcttagtcattacctggttttagagctagaaatagcaagttaaaataaggctagtccgttatcaacttgaaaaagtggcaccgagtcggtgctgagttacaacgaacacctcagcttatcgtcgtcatccttgtaatcgtaatgactaagatgtcatctctgggtccgggtctgggtctgggtttttt

SEQ ID NO: 1040 - DNA, 190 bp, Artificial Sequence
  Synthetic
gtcatcttagtcattacctggttttagagctagaaatagcaagttaaaataaggctagtccgttatcaacttgaaaaagtggcaccgagtcggtgctgagttacaacgaacacctcagcttatcgtcgtcatccttgtaatcgtaatgactaagatgtcatctctgggcagggtctgggctgggtttttt

SEQ ID NO: 1041 - DNA, 190 bp, Artificial Sequence
  Synthetic
gtcatcttagtcattacctggttttagagctagaaatagcaagttaaaataaggctagtccgttatcaacttgaaaaagtggcaccgagtcggtgctgagttacaacgaacacctcagcttatcgtcgtcatccttgtaatcgtaatgactaagatgtcatctctgggctgggatgggaaagggtttttt

SEQ ID NO: 1042 - DNA, 190 bp, Artificial Sequence
  Synthetic
gtcatcttagtcattacctggttttagagctagaaatagcaagttaaaataaggctagtccgttatcaacttgaaaaagtggcaccgagtcggtgctgagttacaacgaacacctcagcttatcgtcgtcatccttgtaatcgtaatgactaagatgtcatctctgggctctgggtgggccgggtttttt

SEQ ID NO: 1043 - DNA, 189 bp, Artificial Sequence
  Synthetic
gtcatcttagtcattacctggttttagagctagaaatagcaagttaaaataaggctagtccgttatcaacttgaaaaagtggcaccgagtcggtgctgagttacaacgaacacctcagcttatcgtcgtcatccttgtaatcgtaatgactaagatgtcatctctgggctgggctgggcagggtttttt

SEQ ID NO: 1044 - DNA, 188 bp, Artificial Sequence
  Synthetic
gtcatcttagtcattacctggttttagagctagaaatagcaagttaaaataaggctagtccgttatcaacttgaaaaagtggcaccgagtcggtgctgagttacaacgaacacctcagcttatcgtcgtcatccttgtaatcgtaatgactaagatgtcatctctgggtgggctgggaagggtttttt

SEQ ID NO: 1045 - DNA, 188 bp, Artificial Sequence
  Synthetic
gtcatcttagtcattacctggttttagagctagaaatagcaagttaaaataaggctagtccgttatcaacttgaaaaagtggcaccgagtcggtgctgagttacaacgaacacctcagcttatcgtcgtcatccttgtaatcgtaatgactaagatgtcatctctgggagggagggctagggtttttt

SEQ ID NO: 1046 - DNA, 188 bp, Artificial Sequence
  Synthetic
gtcatcttagtcattacctggttttagagctagaaatagcaagttaaaataaggctagtccgttatcaacttgaaaaagtggcaccgagtcggtgctgagttacaacgaacacctcagcttatcgtcgtcatccttgtaatcgtaatgactaagatgtcatctctgggcagggctgggagggtttttt

SEQ ID NO: 1047 - DNA, 187 bp, Artificial Sequence
  Synthetic
gtcatcttagtcattacctggttttagagctagaaatagcaagttaaaataaggctagtccgttatcaacttgaaaaagtggcaccgagtcggtgctgagttacaacgaacacctcagcttatcgtcgtcatccttgtaatcgtaatgactaagatgtcatctctgggtgggagggctgggtttttt

SEQ ID NO: 1048 - DNA, 152 bp, Artificial Sequence
  Synthetic
gtcatcttagtcattacctggttttagagctagaaatagcaagttaaaataaggctagtccgttatcaacttgaaaaagtggcaccgagtcggtgcaacgaacacctcatgtaatgactaagatgtcatctcttggtggtggtggttttttt

SEQ ID NO: 1049 - DNA, 159 bp, Artificial Sequence
  Synthetic
gtcatcttagtcattacctggttttagagctagaaatagcaagttaaaataaggctagtccgttatcaacttgaaaaagtggcaccgagtcggtgcaacgaacacctcatgtaatgactaagatgtcatctctgggacagggcagggacagggtttttt

SEQ ID NO: 1050 - DNA, 160 bp, Artificial Sequence
  Synthetic
gtcatcttagtcattacctggttttagagctagaaatagcaagttaaaataaggctagtccgttatcaacttgaaaaagtggcaccgagtcggtgcaacgaacacctcatgtaatgactaagatgtcatctctgggtccgggtctgggtctgggtttttt

SEQ ID NO: 1051 - DNA, 158 bp, Artificial Sequence
  Synthetic
gtcatcttagtcattacctggttttagagctagaaatagcaagttaaaataaggctagtccgttatcaacttgaaaaagtggcaccgagtcggtgcaacgaacacctcatgtaatgactaagatgtcatctctgggcagggtctgggctgggtttttt

SEQ ID NO: 1052 - DNA, 158 bp, Artificial Sequence
  Synthetic
gtcatcttagtcattacctggttttagagctagaaatagcaagttaaaataaggctagtccgttatcaacttgaaaaagtggcaccgagtcggtgcaacgaacacctcatgtaatgactaagatgtcatctctgggctgggatgggaaagggtttttt

SEQ ID NO: 1053 - DNA, 158 bp, Artificial Sequence
  Synthetic
gtcatcttagtcattacctggttttagagctagaaatagcaagttaaaataaggctagtccgttatcaacttgaaaaagtggcaccgagtcggtgcaacgaacacctcatgtaatgactaagatgtcatctctgggctctgggtgggccgggtttttt

SEQ ID NO: 1054 - DNA, 157 bp, Artificial Sequence
  Synthetic
gtcatcttagtcattacctggttttagagctagaaatagcaagttaaaataaggctagtccgttatcaacttgaaaaagtggcaccgagtcggtgcaacgaacacctcatgtaatgactaagatgtcatctctgggctgggctgggcagggtttttt

SEQ ID NO: 1055 - DNA, 156 bp, Artificial Sequence
  Synthetic
gtcatcttagtcattacctggttttagagctagaaatagcaagttaaaataaggctagtccgttatcaacttgaaaaagtggcaccgagtcggtgcaacgaacacctcatgtaatgactaagatgtcatctctgggtgggctgggaagggtttttt

SEQ ID NO: 1056 - DNA, 156 bp, Artificial Sequence
  Synthetic
gtcatcttagtcattacctggttttagagctagaaatagcaagttaaaataaggctagtccgttatcaacttgaaaaagtggcaccgagtcggtgcaacgaacacctcatgtaatgactaagatgtcatctctgggagggagggctagggtttttt

SEQ ID NO: 1057 - DNA, 156 bp, Artificial Sequence
  Synthetic
gtcatcttagtcattacctggttttagagctagaaatagcaagttaaaataaggctagtccgttatcaacttgaaaaagtggcaccgagtcggtgcaacgaacacctcatgtaatgactaagatgtcatctctgggcagggctgggagggtttttt

SEQ ID NO: 1058 - DNA, 155 bp, Artificial Sequence
  Synthetic
gtcatcttagtcattacctggttttagagctagaaatagcaagttaaaataaggctagtccgttatcaacttgaaaaagtggcaccgagtcggtgcaacgaacacctcatgtaatgactaagatgtcatctctgggtgggagggctgggtttttt

SEQ ID NO: 1059 - DNA, 163 bp, Artificial Sequence
  Synthetic
gtcatcttagtcattacctggttttagagctagaaatagcaagttaaaataaggctagtccgttatcaacttgaaaaagtggcaccgagtcggtgcatgggaactcagtttatatgagttagtaatgactaagatgtcatctcttggtggtggtggttttttt

SEQ ID NO: 1060 - DNA, 170 bp, Artificial Sequence
  Synthetic
gtcatcttagtcattacctggttttagagctagaaatagcaagttaaaataaggctagtccgttatcaacttgaaaaagtggcaccgagtcggtgcatgggaactcagtttatatgagttagtaatgactaagatgtcatctctgggacagggcagggacagggtttttt

SEQ ID NO: 1061 - DNA, 171 bp, Artificial Sequence
  Synthetic
gtcatcttagtcattacctggttttagagctagaaatagcaagttaaaataaggctagtccgttatcaacttgaaaaagtggcaccgagtcggtgcatgggaactcagtttatatgagttagtaatgactaagatgtcatctctgggtccgggtctgggtctgggtttttt

SEQ ID NO: 1062 - DNA, 169 bp, Artificial Sequence
  Synthetic
gtcatcttagtcattacctggttttagagctagaaatagcaagttaaaataaggctagtccgttatcaacttgaaaaagtggcaccgagtcggtgcatgggaactcagtttatatgagttagtaatgactaagatgtcatctctgggcagggtctgggctgggtttttt

SEQ ID NO: 1063 - DNA, 169 bp, Artificial Sequence
  Synthetic
gtcatcttagtcattacctggttttagagctagaaatagcaagttaaaataaggctagtccgttatcaacttgaaaaagtggcaccgagtcggtgcatgggaactcagtttatatgagttagtaatgactaagatgtcatctctgggctgggatgggaaagggtttttt

SEQ ID NO: 1064 - DNA, 169 bp, Artificial Sequence
  Synthetic
gtcatcttagtcattacctggttttagagctagaaatagcaagttaaaataaggctagtccgttatcaacttgaaaaagtggcaccgagtcggtgcatgggaactcagtttatatgagttagtaatgactaagatgtcatctctgggctctgggtgggccgggtttttt

SEQ ID NO: 1065 - DNA, 168 bp, Artificial Sequence
  Synthetic
gtcatcttagtcattacctggttttagagctagaaatagcaagttaaaataaggctagtccgttatcaacttgaaaaagtggcaccgagtcggtgcatgggaactcagtttatatgagttagtaatgactaagatgtcatctctgggctgggctgggcagggtttttt

SEQ ID NO: 1066 - DNA, 167 bp, Artificial Sequence
  Synthetic
gtcatcttagtcattacctggttttagagctagaaatagcaagttaaaataaggctagtccgttatcaacttgaaaaagtggcaccgagtcggtgcatgggaactcagtttatatgagttagtaatgactaagatgtcatctctgggtgggctgggaagggtttttt

SEQ ID NO: 1067 - DNA, 167 bp, Artificial Sequence
  Synthetic
gtcatcttagtcattacctggttttagagctagaaatagcaagttaaaataaggctagtccgttatcaacttgaaaaagtggcaccgagtcggtgcatgggaactcagtttatatgagttagtaatgactaagatgtcatctctgggagggagggctagggtttttt

SEQ ID NO: 1068 - DNA, 167 bp, Artificial Sequence
  Synthetic
gtcatcttagtcattacctggttttagagctagaaatagcaagttaaaataaggctagtccgttatcaacttgaaaaagtggcaccgagtcggtgcatgggaactcagtttatatgagttagtaatgactaagatgtcatctctgggcagggctgggagggtttttt

SEQ ID NO: 1069 - DNA, 166 bp, Artificial Sequence
  Synthetic
gtcatcttagtcattacctggttttagagctagaaatagcaagttaaaataaggctagtccgttatcaacttgaaaaagtggcaccgagtcggtgcatgggaactcagtttatatgagttagtaatgactaagatgtcatctctgggtgggagggctgggtttttt

SEQ ID NO: 1070 - DNA, 171 bp, Artificial Sequence
  Synthetic
ggcccagactgagcacgtgagttttagagctagaaatagcaagttaaaataaggctagtccgttatcaacttgaaaaagtggcaccgagtcggtgcttcctctgccatctcgtgctcagtctgtctctctcgcgatgccgtatgccgaaaggcatacggcatcgctttttt

SEQ ID NO: 1071 - DNA, 181 bp, Artificial Sequence
  Synthetic
ggcccagactgagcacgtgagttttagagctagaaatagcaagttaaaataaggctagtccgttatcaacttgaaaaagtggcaccgagtcggtgcagggcttcctttcctctgccatctcgtgctcagtctgtctctctcgcgatgccgtatgccgaaaggcatacggcatcgctttttt

SEQ ID NO: 1072 - DNA, 191 bp, Artificial Sequence
  Synthetic
ggcccagactgagcacgtgagttttagagctagaaatagcaagttaaaataaggctagtccgttatcaacttgaaaaagtggcaccgagtcggtgctggaggaagcagggcttcctttcctctgccatctcgtgctcagtctgtctctctcgcgatgccgtatgccgaaaggcatacggcatcgctttttt

SEQ ID NO: 1073 - DNA, 173 bp, Artificial Sequence
  Synthetic
gtcatcttagtcattacctggttttagagctagaaatagcaagttaaaataaggctagtccgttatcaacttgaaaaagtggcaccgagtcggtgcaacgaacacctcatgtaatgactaagatgtcatctctgcgatgccgtatgccgaaaggcatacggcatcgctttttt

SEQ ID NO: 1074 - DNA, 183 bp, Artificial Sequence
  Synthetic
gtcatcttagtcattacctggttttagagctagaaatagcaagttaaaataaggctagtccgttatcaacttgaaaaagtggcaccgagtcggtgctatgagttacaacgaacacctcatgtaatgactaagatgtcatctctgcgatgccgtatgccgaaaggcatacggcatcgctttttt

SEQ ID NO: 1075 - DNA, 193 bp, Artificial Sequence
  Synthetic
gtcatcttagtcattacctggttttagagctagaaatagcaagttaaaataaggctagtccgttatcaacttgaaaaagtggcaccgagtcggtgcactcagtttatatgagttacaacgaacacctcatgtaatgactaagatgtcatctctgcgatgccgtatgccgaaaggcatacggcatcgctttttt

SEQ ID NO: 1076 - DNA, 174 bp, Artificial Sequence
  Synthetic
gcattttcaggaggaagcgagttttagagctagaaatagcaagttaaaataaggctagtccgttatcaacttgaaaaagtggcaccgagtcggtgctgtctgaagcaatcgcttcctcctgaaaataactctctgcgatgccgtatgccgaaaggcatacggcatcgctttttt

SEQ ID NO: 1077 - DNA, 184 bp, Artificial Sequence
  Synthetic
gcattttcaggaggaagcgagttttagagctagaaatagcaagttaaaataaggctagtccgttatcaacttgaaaaagtggcaccgagtcggtgctcaaatatgctgtctgaagcaatcgcttcctcctgaaaataactctctgcgatgccgtatgccgaaaggcatacggcatcgctttttt

SEQ ID NO: 1078 - DNA, 194 bp, Artificial Sequence
  Synthetic
gcattttcaggaggaagcgagttttagagctagaaatagcaagttaaaataaggctagtccgttatcaacttgaaaaagtggcaccgagtcggtgcaggaaatgactcaaatatgctgtctgaagcaatcgcttcctcctgaaaataactctctgcgatgccgtatgccgaaaggcatacggcatcgctttttt

SEQ ID NO: 1079 - DNA, 169 bp, Artificial Sequence
  Synthetic
gattcctggtgccagaaacagttttagagctagaaatagcaagttaaaataaggctagtccgttatcaacttgaaaaagtggcaccgagtcggtgcgtcaccactgtttctggcaccaggacctcttctgcgatgccgtatgccgaaaggcatacggcatcgctttttt

SEQ ID NO: 1080 - DNA, 180 bp, Artificial Sequence
  Synthetic
gattcctggtgccagaaacagttttagagctagaaatagcaagttaaaataaggctagtccgttatcaacttgaaaaagtggcaccgagtcggtgctctgccctcccgtcaccactgtttctggcaccaggacctcttctgcgatgccgtatgccgaaaggcatacggcatcgctttttt

SEQ ID NO: 1081 - DNA, 189 bp, Artificial Sequence
  Synthetic
gattcctggtgccagaaacagttttagagctagaaatagcaagttaaaataaggctagtccgttatcaacttgaaaaagtggcaccgagtcggtgcaggactagttctgccctcccgtcaccactgtttctggcaccaggacctcttctgcgatgccgtatgccgaaaggcatacggcatcgctttttt

SEQ ID NO: 1082 - DNA, 224 bp, Artificial Sequence
  Synthetic
ggcccagactgagcacgtgagttttagagctagaaatagcaagttaaaataaggctagtccgttatcaacttgaaaaagtggcaccgagtcggtgctggaggaagcagggcttcctttcctctgccatcacttatcgtcgtcatccttgtaatccgtgctcagtctgtctctctcgcgtaacctccatccgagttgcaagagagggaaacgcagtctctttttt

SEQ ID NO: 1083 - DNA, 341 bp, Artificial Sequence
  Synthetic
ggcccagactgagcacgtgagttttagagctagaaatagcaagttaaaataaggctagtccgttatcaacttgaaaaagtggcaccgagtcggtgctggaggaagcagggcttcctttcctctgccatcacttatcgtcgtcatccttgtaatccgtgctcagtctgtctctctcggaattgcgggaaaggggtcaacagccgttcagtaccaagtctcaggggaaactttgagatggccttgcaaagggtatggtaataagctgacggacatggtcctaaccacgcagccaagtcctaagtcaacagatcttctgttgatatggatgcagttcatttttt

SEQ ID NO: 1084 - DNA, 180 bp, Artificial Sequence
  Synthetic
ggcccagactgagcacgtgagttttagagctagaaatagcaagttaaaataaggctagtccgttatcaacttgaaaaagtggcaccgagtcggtgcttcctctgccatctcgtgctcagtctgtctctctcgcgtaacctccatccgagttgcaagagagggaaacgcagtctctttttt

SEQ ID NO: 1085 - DNA, 297 bp, Artificial Sequence
  Synthetic
ggcccagactgagcacgtgagttttagagctagaaatagcaagttaaaataaggctagtccgttatcaacttgaaaaagtggcaccgagtcggtgcttcctctgccatctcgtgctcagtctgtctctctcggaattgcgggaaaggggtcaacagccgttcagtaccaagtctcaggggaaactttgagatggccttgcaaagggtatggtaataagctgacggacatggtcctaaccacgcagccaagtcctaagtcaacagatcttctgttgatatggatgcagttcatttttt

SEQ ID NO: 1086 - DNA, 191 bp, Artificial Sequence
  Synthetic
ggcccagactgagcacgtgagttttagagctagaaatagcaagttaaaataaggctagtccgttatcaacttgaaaaagtggcaccgagtcggtgcgccctctggaggaagcagggcttcccgtgctcagtctgtctctctcgcgtaacctccatccgagttgcaagagagggaaacgcagtctctttttt

SEQ ID NO: 1087 - DNA, 308 bp, Artificial Sequence
  Synthetic
ggcccagactgagcacgtgagttttagagctagaaatagcaagttaaaataaggctagtccgttatcaacttgaaaaagtggcaccgagtcggtgcgccctctggaggaagcagggcttcccgtgctcagtctgtctctctcggaattgcgggaaaggggtcaacagccgttcagtaccaagtctcaggggaaactttgagatggccttgcaaagggtatggtaataagctgacggacatggtcctaaccacgcagccaagtcctaagtcaacagatcttctgttgatatggatgcagttcatttttt

SEQ ID NO: 1088 - DNA, 214 bp, Artificial Sequence
  Synthetic
gtcatcttagtcattacctggttttagagctagaaatagcaagttaaaataaggctagtccgttatcaacttgaaaaagtggcaccgagtcggtgctgagttacaacgaacacctcagcttatcgtcgtcatccttgtaatcgtaatgactaagatgtcatctctgcgtaacctccatccgagttgcaagagagggaaacgcagtctctttttt

SEQ ID NO: 1089 - DNA, 331 bp, Artificial Sequence
  Synthetic
gtcatcttagtcattacctggttttagagctagaaatagcaagttaaaataaggctagtccgttatcaacttgaaaaagtggcaccgagtcggtgctgagttacaacgaacacctcagcttatcgtcgtcatccttgtaatcgtaatgactaagatgtcatctctggaattgcgggaaaggggtcaacagccgttcagtaccaagtctcaggggaaactttgagatggccttgcaaagggtatggtaataagctgacggacatggtcctaaccacgcagccaagtcctaagtcaacagatcttctgttgatatggatgcagttcatttttt

SEQ ID NO: 1090 - DNA, 182 bp, Artificial Sequence
  Synthetic
gtcatcttagtcattacctggttttagagctagaaatagcaagttaaaataaggctagtccgttatcaacttgaaaaagtggcaccgagtcggtgcaacgaacacctcatgtaatgactaagatgtcatctctgcgtaacctccatccgagttgcaagagagggaaacgcagtctctttttt

SEQ ID NO: 1091 - DNA, 299 bp, Artificial Sequence
  Synthetic
gtcatcttagtcattacctggttttagagctagaaatagcaagttaaaataaggctagtccgttatcaacttgaaaaagtggcaccgagtcggtgcaacgaacacctcatgtaatgactaagatgtcatctctggaattgcgggaaaggggtcaacagccgttcagtaccaagtctcaggggaaactttgagatggccttgcaaagggtatggtaataagctgacggacatggtcctaaccacgcagccaagtcctaagtcaacagatcttctgttgatatggatgcagttcatttttt

SEQ ID NO: 1092 - DNA, 193 bp, Artificial Sequence
  Synthetic
gtcatcttagtcattacctggttttagagctagaaatagcaagttaaaataaggctagtccgttatcaacttgaaaaagtggcaccgagtcggtgcatgggaactcagtttatatgagttagtaatgactaagatgtcatctctgcgtaacctccatccgagttgcaagagagggaaacgcagtctctttttt

SEQ ID NO: 1093 - DNA, 310 bp, Artificial Sequence
  Synthetic
gtcatcttagtcattacctggttttagagctagaaatagcaagttaaaataaggctagtccgttatcaacttgaaaaagtggcaccgagtcggtgcatgggaactcagtttatatgagttagtaatgactaagatgtcatctctggaattgcgggaaaggggtcaacagccgttcagtaccaagtctcaggggaaactttgagatggccttgcaaagggtatggtaataagctgacggacatggtcctaaccacgcagccaagtcctaagtcaacagatcttctgttgatatggatgcagttcatttttt

SEQ ID NO: 1094 - DNA, 223 bp, Artificial Sequence
  Synthetic
ggcccagactgagcacgtgagttttagagctagaaatagcaagttaaaataaggctagtccgttatcaacttgaaaaagtggcaccgagtcggtgctggaggaagcagggcttcctttcctctgccatcacttatcgtcgtcatccttgtaatccgtgctcagtctgtctctctccgcgagtctaggggataacgcgttaaacttcctagaaggcggtttttt

SEQ ID NO: 1095 - DNA, 223 bp, Artificial Sequence
  Synthetic
ggcccagactgagcacgtgagttttagagctagaaatagcaagttaaaataaggctagtccgttatcaacttgaaaaagtggcaccgagtcggtgctggaggaagcagggcttcctttcctctgccatcacttatcgtcgtcatccttgtaatccgtgctcagtctgtctctctccgcggatctagattgtaacgcgttaaaccatctagaaggcggtttttt

SEQ ID NO: 1096 - DNA, 223 bp, Artificial Sequence
  Synthetic
ggcccagactgagcacgtgagttttagagctagaaatagcaagttaaaataaggctagtccgttatcaacttgaaaaagtggcaccgagtcggtgctggaggaagcagggcttcctttcctctgccatcacttatcgtcgtcatccttgtaatccgtgctcagtctgtctctctccgcgtcgctaccgcccggcgcgttaaacacactagaaggcggtttttt

SEQ ID NO: 1097 - DNA, 179 bp, Artificial Sequence
  Synthetic
ggcccagactgagcacgtgagttttagagctagaaatagcaagttaaaataaggctagtccgttatcaacttgaaaaagtggcaccgagtcggtgcttcctctgccatctcgtgctcagtctgtctctctccgcgagtctaggggataacgcgttaaacttcctagaaggcggtttttt

SEQ ID NO: 1098 - DNA, 179 bp, Artificial Sequence
  Synthetic
ggcccagactgagcacgtgagttttagagctagaaatagcaagttaaaataaggctagtccgttatcaacttgaaaaagtggcaccgagtcggtgcttcctctgccatctcgtgctcagtctgtctctctccgcggatctagattgtaacgcgttaaaccatctagaaggcggtttttt

SEQ ID NO: 1099 - DNA, 179 bp, Artificial Sequence
  Synthetic
ggcccagactgagcacgtgagttttagagctagaaatagcaagttaaaataaggctagtccgttatcaacttgaaaaagtggcaccgagtcggtgcttcctctgccatctcgtgctcagtctgtctctctccgcgtcgctaccgcccggcgcgttaaacacactagaaggcggtttttt

SEQ ID NO: 1100 - DNA, 190 bp, Artificial Sequence
  Synthetic
ggcccagactgagcacgtgagttttagagctagaaatagcaagttaaaataaggctagtccgttatcaacttgaaaaagtggcaccgagtcggtgcgccctctggaggaagcagggcttcccgtgctcagtctgtctctctccgcgagtctaggggataacgcgttaaacttcctagaaggcggtttttt

SEQ ID NO: 1101 - DNA, 190 bp, Artificial Sequence
  Synthetic
ggcccagactgagcacgtgagttttagagctagaaatagcaagttaaaataaggctagtccgttatcaacttgaaaaagtggcaccgagtcggtgcgccctctggaggaagcagggcttcccgtgctcagtctgtctctctccgcggatctagattgtaacgcgttaaaccatctagaaggcggtttttt

SEQ ID NO: 1102 - DNA, 213 bp, Artificial Sequence
  Synthetic
gtcatcttagtcattacctggttttagagctagaaatagcaagttaaaataaggctagtccgttatcaacttgaaaaagtggcaccgagtcggtgctgagttacaacgaacacctcagcttatcgtcgtcatccttgtaatcgtaatgactaagatgtcatctctcgcgagtctaggggataacgcgttaaacttcctagaaggcggtttttt

SEQ ID NO: 1103 - DNA, 213 bp, Artificial Sequence
  Synthetic
gtcatcttagtcattacctggttttagagctagaaatagcaagttaaaataaggctagtccgttatcaacttgaaaaagtggcaccgagtcggtgctgagttacaacgaacacctcagcttatcgtcgtcatccttgtaatcgtaatgactaagatgtcatctctcgcggatctagattgtaacgcgttaaaccatctagaaggcggtttttt

SEQ ID NO: 1104 - DNA, 213 bp, Artificial Sequence
  Synthetic
gtcatcttagtcattacctggttttagagctagaaatagcaagttaaaataaggctagtccgttatcaacttgaaaaagtggcaccgagtcggtgctgagttacaacgaacacctcagcttatcgtcgtcatccttgtaatcgtaatgactaagatgtcatctctcgcgtcgctaccgcccggcgcgttaaacacactagaaggcggtttttt

SEQ ID NO: 1105 - DNA, 181 bp, Artificial Sequence
  Synthetic
gtcatcttagtcattacctggttttagagctagaaatagcaagttaaaataaggctagtccgttatcaacttgaaaaagtggcaccgagtcggtgcaacgaacacctcatgtaatgactaagatgtcatctctcgcgagtctaggggataacgcgttaaacttcctagaaggcggtttttt

SEQ ID NO: 1106 - DNA, 181 bp, Artificial Sequence
  Synthetic
gtcatcttagtcattacctggttttagagctagaaatagcaagttaaaataaggctagtccgttatcaacttgaaaaagtggcaccgagtcggtgcaacgaacacctcatgtaatgactaagatgtcatctctcgcggatctagattgtaacgcgttaaaccatctagaaggcggtttttt

SEQ ID NO: 1107 - DNA, 181 bp, Artificial Sequence
  Synthetic
gtcatcttagtcattacctggttttagagctagaaatagcaagttaaaataaggctagtccgttatcaacttgaaaaagtggcaccgagtcggtgcaacgaacacctcatgtaatgactaagatgtcatctctcgcgtcgctaccgcccggcgcgttaaacacactagaaggcggtttttt

SEQ ID NO: 1108 - DNA, 192 bp, Artificial Sequence
  Synthetic
gtcatcttagtcattacctggttttagagctagaaatagcaagttaaaataaggctagtccgttatcaacttgaaaaagtggcaccgagtcggtgcatgggaactcagtttatatgagttagtaatgactaagatgtcatctctcgcgagtctaggggataacgcgttaaacttcctagaaggcggtttttt

SEQ ID NO: 1109 - DNA, 192 bp, Artificial Sequence
  Synthetic
gtcatcttagtcattacctggttttagagctagaaatagcaagttaaaataaggctagtccgttatcaacttgaaaaagtggcaccgagtcggtgcatgggaactcagtttatatgagttagtaatgactaagatgtcatctctcgcggatctagattgtaacgcgttaaaccatctagaaggcggtttttt

SEQ ID NO: 1110 - DNA, 192 bp, Artificial Sequence
  Synthetic
gtcatcttagtcattacctggttttagagctagaaatagcaagttaaaataaggctagtccgttatcaacttgaaaaagtggcaccgagtcggtgcatgggaactcagtttatatgagttagtaatgactaagatgtcatctctcgcgtcgctaccgcccggcgcgttaaacacactagaaggcggtttttt

SEQ ID NO: 1111 - DNA, 241 bp, Artificial Sequence
  Synthetic
ggcccagactgagcacgtgagttttagagctagaaatagcaagttaaaataaggctagtccgttatcaacttgaaaaagtggcaccgagtcggtgctggaggaagcagggcttcctttcctctgccatcacttatcgtcgtcatccttgtaatccgtgctcagtctgtctctctcgtcagggtcaggagccccccccctgaacccaggataaccctcaaagtcggggggcaaccctttttt

SEQ ID NO: 1112 - DNA, 237 bp, Artificial Sequence
  Synthetic
ggcccagactgagcacgtgagttttagagctagaaatagcaagttaaaataaggctagtccgttatcaacttgaaaaagtggcaccgagtcggtgctggaggaagcagggcttcctttcctctgccatcacttatcgtcgtcatccttgtaatccgtgctcagtctgtctctctcgggtcaggagccccccccctgaacccaggaaaaccctcaaagtcggggggcaaccctttttt

SEQ ID NO: 1113 - DNA, 237 bp, Artificial Sequence
  Synthetic
ggcccagactgagcacgtgagttttagagctagaaatagcaagttaaaataaggctagtccgttatcaacttgaaaaagtggcaccgagtcggtgctggaggaagcagggcttcctttcctctgccatcacttatcgtcgtcatccttgtaatccgtgctcagtctgtctctctcgggtcaggagccccccccctgcacccaggaaaaccctcaaagtcggggggcaaccctttttt

SEQ ID NO: 1114 - DNA, 237 bp, Artificial Sequence
  Synthetic
ggcccagactgagcacgtgagttttagagctagaaatagcaagttaaaataaggctagtccgttatcaacttgaaaaagtggcaccgagtcggtgctggaggaagcagggcttcctttcctctgccatcacttatcgtcgtcatccttgtaatccgtgctcagtctgtctctctcgggtcaggagccccccccctgcacccaggataaccctcaaagtcggggggcaaccctttttt

SEQ ID NO: 1115 - DNA, 241 bp, Artificial Sequence
  Synthetic
ggcccagactgagcacgtgagttttagagctagaaatagcaagttaaaataaggctagtccgttatcaacttgaaaaagtggcaccgagtcggtgctggaggaagcagggcttcctttcctctgccatcacttatcgtcgtcatccttgtaatccgtgctcagtctgtctctctcgtcagggtcaggagccccccccctgaacccaggaaaaccctcaaagtcggggggcaaccctttttt

SEQ ID NO: 1116 - DNA, 241 bp, Artificial Sequence
  Synthetic
ggcccagactgagcacgtgagttttagagctagaaatagcaagttaaaataaggctagtccgttatcaacttgaaaaagtggcaccgagtcggtgctggaggaagcagggcttcctttcctctgccatcacttatcgtcgtcatccttgtaatccgtgctcagtctgtctctctcgtcagggtcaggagccccccccctgcacccaggaaaaccctcaaagtcggggggcaaccctttttt

SEQ ID NO: 1117 - DNA, 197 bp, Artificial Sequence
  Synthetic
ggcccagactgagcacgtgagttttagagctagaaatagcaagttaaaataaggctagtccgttatcaacttgaaaaagtggcaccgagtcggtgcttcctctgccatctcgtgctcagtctgtctctctcgtcagggtcaggagccccccccctgaacccaggataaccctcaaagtcggggggcaaccctttttt

SEQ ID NO: 1118 - DNA, 193 bp, Artificial Sequence
  Synthetic
ggcccagactgagcacgtgagttttagagctagaaatagcaagttaaaataaggctagtccgttatcaacttgaaaaagtggcaccgagtcggtgcttcctctgccatctcgtgctcagtctgtctctctcgggtcaggagccccccccctgaacccaggaaaaccctcaaagtcggggggcaaccctttttt

SEQ ID NO: 1119 - DNA, 193 bp, Artificial Sequence
  Synthetic
ggcccagactgagcacgtgagttttagagctagaaatagcaagttaaaataaggctagtccgttatcaacttgaaaaagtggcaccgagtcggtgcttcctctgccatctcgtgctcagtctgtctctctcgggtcaggagccccccccctgcacccaggaaaaccctcaaagtcggggggcaaccctttttt

SEQ ID NO: 1120 - DNA, 193 bp, Artificial Sequence
  Synthetic
ggcccagactgagcacgtgagttttagagctagaaatagcaagttaaaataaggctagtccgttatcaacttgaaaaagtggcaccgagtcggtgcttcctctgccatctcgtgctcagtctgtctctctcgggtcaggagccccccccctgcacccaggataaccctcaaagtcggggggcaaccctttttt

SEQ ID NO: 1121 - DNA, 197 bp, Artificial Sequence
  Synthetic
ggcccagactgagcacgtgagttttagagctagaaatagcaagttaaaataaggctagtccgttatcaacttgaaaaagtggcaccgagtcggtgcttcctctgccatctcgtgctcagtctgtctctctcgtcagggtcaggagccccccccctgaacccaggaaaaccctcaaagtcggggggcaaccctttttt

SEQ ID NO: 1122 - DNA, 197 bp, Artificial Sequence
  Synthetic
ggcccagactgagcacgtgagttttagagctagaaatagcaagttaaaataaggctagtccgttatcaacttgaaaaagtggcaccgagtcggtgcttcctctgccatctcgtgctcagtctgtctctctcgtcagggtcaggagccccccccctgcacccaggaaaaccctcaaagtcggggggcaaccctttttt

SEQ ID NO: 1123 - DNA, 208 bp, Artificial Sequence
  Synthetic
ggcccagactgagcacgtgagttttagagctagaaatagcaagttaaaataaggctagtccgttatcaacttgaaaaagtggcaccgagtcggtgcgccctctggaggaagcagggcttcccgtgctcagtctgtctctctcgtcagggtcaggagccccccccctgaacccaggataaccctcaaagtcggggggcaaccctttttt

SEQ ID NO: 1124 - DNA, 204 bp, Artificial Sequence
  Synthetic
ggcccagactgagcacgtgagttttagagctagaaatagcaagttaaaataaggctagtccgttatcaacttgaaaaagtggcaccgagtcggtgcgccctctggaggaagcagggcttcccgtgctcagtctgtctctctcgggtcaggagccccccccctgaacccaggaaaaccctcaaagtcggggggcaaccctttttt

SEQ ID NO: 1125 - DNA, 204 bp, Artificial Sequence
  Synthetic
ggcccagactgagcacgtgagttttagagctagaaatagcaagttaaaataaggctagtccgttatcaacttgaaaaagtggcaccgagtcggtgcgccctctggaggaagcagggcttcccgtgctcagtctgtctctctcgggtcaggagccccccccctgcacccaggaaaaccctcaaagtcggggggcaaccctttttt

SEQ ID NO: 1126 - DNA, 204 bp, Artificial Sequence
  Synthetic
ggcccagactgagcacgtgagttttagagctagaaatagcaagttaaaataaggctagtccgttatcaacttgaaaaagtggcaccgagtcggtgcgccctctggaggaagcagggcttcccgtgctcagtctgtctctctcgggtcaggagccccccccctgcacccaggataaccctcaaagtcggggggcaaccctttttt

SEQ ID NO: 1127 - DNA, 208 bp, Artificial Sequence
  Synthetic
ggcccagactgagcacgtgagttttagagctagaaatagcaagttaaaataaggctagtccgttatcaacttgaaaaagtggcaccgagtcggtgcgccctctggaggaagcagggcttcccgtgctcagtctgtctctctcgtcagggtcaggagccccccccctgaacccaggaaaaccctcaaagtcggggggcaaccctttttt

SEQ ID NO: 1128 - DNA, 208 bp, Artificial Sequence
  Synthetic
ggcccagactgagcacgtgagttttagagctagaaatagcaagttaaaataaggctagtccgttatcaacttgaaaaagtggcaccgagtcggtgcgccctctggaggaagcagggcttcccgtgctcagtctgtctctctcgtcagggtcaggagccccccccctgcacccaggaaaaccctcaaagtcggggggcaaccctttttt

SEQ ID NO: 1129 - DNA, 231 bp, Artificial Sequence
  Synthetic
gtcatcttagtcattacctggttttagagctagaaatagcaagttaaaataaggctagtccgttatcaacttgaaaaagtggcaccgagtcggtgctgagttacaacgaacacctcagcttatcgtcgtcatccttgtaatcgtaatgactaagatgtcatctctgtcagggtcaggagccccccccctgaacccaggataaccctcaaagtcggggggcaaccctttttt

SEQ ID NO: 1130 - DNA, 227 bp, Artificial Sequence
  Synthetic
gtcatcttagtcattacctggttttagagctagaaatagcaagttaaaataaggctagtccgttatcaacttgaaaaagtggcaccgagtcggtgctgagttacaacgaacacctcagcttatcgtcgtcatccttgtaatcgtaatgactaagatgtcatctctgggtcaggagccccccccctgaacccaggaaaaccctcaaagtcggggggcaaccctttttt

SEQ ID NO: 1131 - DNA, 227 bp, Artificial Sequence
  Synthetic
gtcatcttagtcattacctggttttagagctagaaatagcaagttaaaataaggctagtccgttatcaacttgaaaaagtggcaccgagtcggtgctgagttacaacgaacacctcagcttatcgtcgtcatccttgtaatcgtaatgactaagatgtcatctctgggtcaggagccccccccctgcacccaggaaaaccctcaaagtcggggggcaaccctttttt

SEQ ID NO: 1132 - DNA, 227 bp, Artificial Sequence
  Synthetic
gtcatcttagtcattacctggttttagagctagaaatagcaagttaaaataaggctagtccgttatcaacttgaaaaagtggcaccgagtcggtgctgagttacaacgaacacctcagcttatcgtcgtcatccttgtaatcgtaatgactaagatgtcatctctgggtcaggagccccccccctgcacccaggataaccctcaaagtcggggggcaaccctttttt

SEQ ID NO: 1133 - DNA, 231 bp, Artificial Sequence
  Synthetic
gtcatcttagtcattacctggttttagagctagaaatagcaagttaaaataaggctagtccgttatcaacttgaaaaagtggcaccgagtcggtgctgagttacaacgaacacctcagcttatcgtcgtcatccttgtaatcgtaatgactaagatgtcatctctgtcagggtcaggagccccccccctgaacccaggaaaaccctcaaagtcggggggcaaccctttttt

SEQ ID NO: 1134 - DNA, 231 bp, Artificial Sequence
  Synthetic
gtcatcttagtcattacctggttttagagctagaaatagcaagttaaaataaggctagtccgttatcaacttgaaaaagtggcaccgagtcggtgctgagttacaacgaacacctcagcttatcgtcgtcatccttgtaatcgtaatgactaagatgtcatctctgtcagggtcaggagccccccccctgcacccaggaaaaccctcaaagtcggggggcaaccctttttt

SEQ ID NO: 1135 - DNA, 199 bp, Artificial Sequence
  Synthetic
gtcatcttagtcattacctggttttagagctagaaatagcaagttaaaataaggctagtccgttatcaacttgaaaaagtggcaccgagtcggtgcaacgaacacctcatgtaatgactaagatgtcatctctgtcagggtcaggagccccccccctgaacccaggataaccctcaaagtcggggggcaaccctttttt

SEQ ID NO: 1136 - DNA, 195 bp, Artificial Sequence
  Synthetic
gtcatcttagtcattacctggttttagagctagaaatagcaagttaaaataaggctagtccgttatcaacttgaaaaagtggcaccgagtcggtgcaacgaacacctcatgtaatgactaagatgtcatctctgggtcaggagccccccccctgaacccaggaaaaccctcaaagtcggggggcaaccctttttt

SEQ ID NO: 1137 - DNA, 195 bp, Artificial Sequence
  Synthetic
gtcatcttagtcattacctggttttagagctagaaatagcaagttaaaataaggctagtccgttatcaacttgaaaaagtggcaccgagtcggtgcaacgaacacctcatgtaatgactaagatgtcatctctgggtcaggagccccccccctgcacccaggaaaaccctcaaagtcggggggcaaccctttttt

SEQ ID NO: 1138 - DNA, 195 bp, Artificial Sequence
  Synthetic
gtcatcttagtcattacctggttttagagctagaaatagcaagttaaaataaggctagtccgttatcaacttgaaaaagtggcaccgagtcggtgcaacgaacacctcatgtaatgactaagatgtcatctctgggtcaggagccccccccctgcacccaggataaccctcaaagtcggggggcaaccctttttt

SEQ ID NO: 1139 - DNA, 199 bp, Artificial Sequence
  Synthetic
gtcatcttagtcattacctggttttagagctagaaatagcaagttaaaataaggctagtccgttatcaacttgaaaaagtggcaccgagtcggtgcaacgaacacctcatgtaatgactaagatgtcatctctgtcagggtcaggagccccccccctgaacccaggaaaaccctcaaagtcggggggcaaccctttttt

SEQ ID NO: 1140 - DNA, 199 bp, Artificial Sequence
  Synthetic
gtcatcttagtcattacctggttttagagctagaaatagcaagttaaaataaggctagtccgttatcaacttgaaaaagtggcaccgagtcggtgcaacgaacacctcatgtaatgactaagatgtcatctctgtcagggtcaggagccccccccctgcacccaggaaaaccctcaaagtcggggggcaaccctttttt

SEQ ID NO: 1141 - DNA, 210 bp, Artificial Sequence
  Synthetic
gtcatcttagtcattacctggttttagagctagaaatagcaagttaaaataaggctagtccgttatcaacttgaaaaagtggcaccgagtcggtgcatgggaactcagtttatatgagttagtaatgactaagatgtcatctctgtcagggtcaggagccccccccctgaacccaggataaccctcaaagtcggggggcaaccctttttt

SEQ ID NO: 1142 - DNA, 206 bp, Artificial Sequence
  Synthetic
gtcatcttagtcattacctggttttagagctagaaatagcaagttaaaataaggctagtccgttatcaacttgaaaaagtggcaccgagtcggtgcatgggaactcagtttatatgagttagtaatgactaagatgtcatctctgggtcaggagccccccccctgaacccaggaaaaccctcaaagtcggggggcaaccctttttt

SEQ ID NO: 1143 - DNA, 206 bp, Artificial Sequence
  Synthetic
gtcatcttagtcattacctggttttagagctagaaatagcaagttaaaataaggctagtccgttatcaacttgaaaaagtggcaccgagtcggtgcatgggaactcagtttatatgagttagtaatgactaagatgtcatctctgggtcaggagccccccccctgcacccaggaaaaccctcaaagtcggggggcaaccctttttt

SEQ ID NO: 1144 - DNA, 206 bp, Artificial Sequence
  Synthetic
gtcatcttagtcattacctggttttagagctagaaatagcaagttaaaataaggctagtccgttatcaacttgaaaaagtggcaccgagtcggtgcatgggaactcagtttatatgagttagtaatgactaagatgtcatctctgggtcaggagccccccccctgcacccaggataaccctcaaagtcggggggcaaccctttttt

SEQ ID NO: 1145 - DNA, 210 bp, Artificial Sequence
  Synthetic
gtcatcttagtcattacctggttttagagctagaaatagcaagttaaaataaggctagtccgttatcaacttgaaaaagtggcaccgagtcggtgcatgggaactcagtttatatgagttagtaatgactaagatgtcatctctgtcagggtcaggagccccccccctgaacccaggaaaaccctcaaagtcggggggcaaccctttttt

SEQ ID NO: 1146 - DNA, 210 bp, Artificial Sequence
  Synthetic
gtcatcttagtcattacctggttttagagctagaaatagcaagttaaaataaggctagtccgttatcaacttgaaaaagtggcaccgagtcggtgcatgggaactcagtttatatgagttagtaatgactaagatgtcatctctgtcagggtcaggagccccccccctgcacccaggaaaaccctcaaagtcggggggcaaccctttttt

SEQ ID NO: 1147 - DNA, 218 bp, Artificial Sequence
  Synthetic
ggcccagactgagcacgtgagttttagagctagaaatagcaagttaaaataaggctagtccgttatcaacttgaaaaagtggcaccgagtcggtgctggaggaagcagggcttcctttcctctgccatcacttatcgtcgtcatccttgtaatccgtgctcagtctgtctctctccgcggttctatctagttacgcgttaaaccaactagaatttttt

SEQ ID NO: 1148 - DNA, 232 bp, Artificial Sequence
  Synthetic
ggcccagactgagcacgtgagttttagagctagaaatagcaagttaaaataaggctagtccgttatcaacttgaaaaagtggcaccgagtcggtgctggaggaagcagggcttcctttcctctgccatcacttatcgtcgtcatccttgtaatccgtgctcagtctgtctctctcgggtcaggagccccccccctgaacccaggataaccctcaaagtcggggggctttttt

SEQ ID NO: 1149 - DNA, 174 bp, Artificial Sequence
  Synthetic
ggcccagactgagcacgtgagttttagagctagaaatagcaagttaaaataaggctagtccgttatcaacttgaaaaagtggcaccgagtcggtgcttcctctgccatctcgtgctcagtctgtctctctccgcggttctatctagttacgcgttaaaccaactagaatttttt

SEQ ID NO: 1150 - DNA, 188 bp, Artificial Sequence
  Synthetic
ggcccagactgagcacgtgagttttagagctagaaatagcaagttaaaataaggctagtccgttatcaacttgaaaaagtggcaccgagtcggtgcttcctctgccatctcgtgctcagtctgtctctctcgggtcaggagccccccccctgaacccaggataaccctcaaagtcggggggctttttt

SEQ ID NO: 1151 - DNA, 185 bp, Artificial Sequence
  Synthetic
ggcccagactgagcacgtgagttttagagctagaaatagcaagttaaaataaggctagtccgttatcaacttgaaaaagtggcaccgagtcggtgcgccctctggaggaagcagggcttcccgtgctcagtctgtctctctccgcggttctatctagttacgcgttaaaccaactagaatttttt

SEQ ID NO: 1152 - DNA, 199 bp, Artificial Sequence
  Synthetic
ggcccagactgagcacgtgagttttagagctagaaatagcaagttaaaataaggctagtccgttatcaacttgaaaaagtggcaccgagtcggtgcgccctctggaggaagcagggcttcccgtgctcagtctgtctctctcgggtcaggagccccccccctgaacccaggataaccctcaaagtcggggggctttttt

SEQ ID NO: 1153 - DNA, 208 bp, Artificial Sequence
  Synthetic
gtcatcttagtcattacctggttttagagctagaaatagcaagttaaaataaggctagtccgttatcaacttgaaaaagtggcaccgagtcggtgctgagttacaacgaacacctcagcttatcgtcgtcatccttgtaatcgtaatgactaagatgtcatctctcgcggttctatctagttacgcgttaaaccaactagaatttttt

SEQ ID NO: 1154 - DNA, 222 bp, Artificial Sequence
  Synthetic
gtcatcttagtcattacctggttttagagctagaaatagcaagttaaaataaggctagtccgttatcaacttgaaaaagtggcaccgagtcggtgctgagttacaacgaacacctcagcttatcgtcgtcatccttgtaatcgtaatgactaagatgtcatctctgggtcaggagccccccccctgaacccaggataaccctcaaagtcggggggctttttt

SEQ ID NO: 1155 - DNA, 176 bp, Artificial Sequence
  Synthetic
gtcatcttagtcattacctggttttagagctagaaatagcaagttaaaataaggctagtccgttatcaacttgaaaaagtggcaccgagtcggtgcaacgaacacctcatgtaatgactaagatgtcatctctcgcggttctatctagttacgcgttaaaccaactagaatttttt

SEQ ID NO: 1156 - DNA, 190 bp, Artificial Sequence
  Synthetic
gtcatcttagtcattacctggttttagagctagaaatagcaagttaaaataaggctagtccgttatcaacttgaaaaagtggcaccgagtcggtgcaacgaacacctcatgtaatgactaagatgtcatctctgggtcaggagccccccccctgaacccaggataaccctcaaagtcggggggctttttt

SEQ ID NO: 1157 - DNA, 187 bp, Artificial Sequence
  Synthetic
gtcatcttagtcattacctggttttagagctagaaatagcaagttaaaataaggctagtccgttatcaacttgaaaaagtggcaccgagtcggtgcatgggaactcagtttatatgagttagtaatgactaagatgtcatctctcgcggttctatctagttacgcgttaaaccaactagaatttttt

SEQ ID NO: 1158 - DNA, 201 bp, Artificial Sequence
  Synthetic
gtcatcttagtcattacctggttttagagctagaaatagcaagttaaaataaggctagtccgttatcaacttgaaaaagtggcaccgagtcggtgcatgggaactcagtttatatgagttagtaatgactaagatgtcatctctgggtcaggagccccccccctgaacccaggataaccctcaaagtcggggggctttttt

SEQ ID NO: 1159 - DNA, 197 bp, Artificial Sequence
  Synthetic
gattcctggtgccagaaacagttttagagctagaaatagcaagttaaaataaggctagtccgttatcaacttgaaaaagtggcaccgagtcggtgcaggaggaagctgctaaggactagttctgcccttctggcaccaggaaatcggtcttgacgcggttctatctagttacgcgttaaaccaactagaaatttttt

SEQ ID NO: 1160 - DNA, 197 bp, Artificial Sequence
  Synthetic
gattcctggtgccagaaacagttttagagctagaaatagcaagttaaaataaggctagtccgttatcaacttgaaaaagtggcaccgagtcggtgcaggaggaagctgctaaggactagttctgcccttctggcaccaggataaaaaaattgacgcggttctatctagttacgcgttaaaccaactagaaatttttt

SEQ ID NO: 1161 - DNA, 197 bp, Artificial Sequence
  Synthetic
gattcctggtgccagaaacagttttagagctagaaatagcaagttaaaataaggctagtccgttatcaacttgaaaaagtggcaccgagtcggtgcaggaggaagctgctaaggactagttctgcccttctggcaccaggatgaaaaggttgacgcggttctatctagttacgcgttaaaccaactagaaatttttt

SEQ ID NO: 1162 - DNA, 197 bp, Artificial Sequence
  Synthetic
gattcctggtgccagaaacagttttagagctagaaatagcaagttaaaataaggctagtccgttatcaacttgaaaaagtggcaccgagtcggtgcaggaggaagctgctaaggactagttctgcccttctggcaccaggatgaatgacttgacgcggttctatctagttacgcgttaaaccaactagaaatttttt

SEQ ID NO: 1163 - DNA, 197 bp, Artificial Sequence
  Synthetic
gattcctggtgccagaaacagttttagagctagaaatagcaagttaaaataaggctagtccgttatcaacttgaaaaagtggcaccgagtcggtgcaggaggaagctgctaaggactagttctgcccttctggcaccaggataacgagcttgacgcggttctatctagttacgcgttaaaccaactagaaatttttt

SEQ ID NO: 1164 - DNA, 197 bp, Artificial Sequence
  Synthetic
gattcctggtgccagaaacagttttagagctagaaatagcaagttaaaataaggctagtccgttatcaacttgaaaaagtggcaccgagtcggtgcaggaggaagctgctaaggactagttctgcccttctggcaccaggataaaacggttgacgcggttctatctagttacgcgttaaaccaactagaaatttttt

SEQ ID NO: 1165 - DNA, 197 bp, Artificial Sequence
  Synthetic
gattcctggtgccagaaacagttttagagctagaaatagcaagttaaaataaggctagtccgttatcaacttgaaaaagtggcaccgagtcggtgcaggaggaagctgctaaggactagttctgcccttctggcaccaggaagtcgtacttgacgcggttctatctagttacgcgttaaaccaactagaaatttttt

SEQ ID NO: 1166 - DNA, 197 bp, Artificial Sequence
  Synthetic
gattcctggtgccagaaacagttttagagctagaaatagcaagttaaaataaggctagtccgttatcaacttgaaaaagtggcaccgagtcggtgcaggaggaagctgctaaggactagttctgcccttctggcaccaggagttagccattgacgcggttctatctagttacgcgttaaaccaactagaaatttttt

SEQ ID NO: 1167 - DNA, 197 bp, Artificial Sequence
  Synthetic
gattcctggtgccagaaacagttttagagctagaaatagcaagttaaaataaggctagtccgttatcaacttgaaaaagtggcaccgagtcggtgcaggaggaagctgctaaggactagttctgcccttctggcaccaggagatcgactttgacgcggttctatctagttacgcgttaaaccaactagaaatttttt

SEQ ID NO: 1168 - DNA, 197 bp, Artificial Sequence
  Synthetic
gattcctggtgccagaaacagttttagagctagaaatagcaagttaaaataaggctagtccgttatcaacttgaaaaagtggcaccgagtcggtgcaggaggaagctgctaaggactagttctgcccttctggcaccaggaagtcgcgcttgacgcggttctatctagttacgcgttaaaccaactagaaatttttt

SEQ ID NO: 1169 - DNA, 197 bp, Artificial Sequence
  Synthetic
gattcctggtgccagaaacagttttagagctagaaatagcaagttaaaataaggctagtccgttatcaacttgaaaaagtggcaccgagtcggtgcaggaggaagctgctaaggactagttctgcccttctggcaccaggaattaccgtttgacgcggttctatctagttacgcgttaaaccaactagaaatttttt

SEQ ID NO: 1170 - DNA, 197 bp, Artificial Sequence
  Synthetic
gattcctggtgccagaaacagttttagagctagaaatagcaagttaaaataaggctagtccgttatcaacttgaaaaagtggcaccgagtcggtgcaggaggaagctgctaaggactagttctgcccttctggcaccaggatgctagaattgacgcggttctatctagttacgcgttaaaccaactagaaatttttt

SEQ ID NO: 1171 - DNA, 197 bp, Artificial Sequence
  Synthetic
gattcctggtgccagaaacagttttagagctagaaatagcaagttaaaataaggctagtccgttatcaacttgaaaaagtggcaccgagtcggtgcaggaggaagctgctaaggactagttctgcccttctggcaccaggatgggccaattgacgcggttctatctagttacgcgttaaaccaactagaaatttttt

SEQ ID NO: 1172 - DNA, 197 bp, Artificial Sequence
  Synthetic
gattcctggtgccagaaacagttttagagctagaaatagcaagttaaaataaggctagtccgttatcaacttgaaaaagtggcaccgagtcggtgcaggaggaagctgctaaggactagttctgcccttctggcaccaggacggtgcccttgacgcggttctatctagttacgcgttaaaccaactagaaatttttt

SEQ ID NO: 1173 - DNA, 197 bp, Artificial Sequence
  Synthetic
gattcctggtgccagaaacagttttagagctagaaatagcaagttaaaataaggctagtccgttatcaacttgaaaaagtggcaccgagtcggtgcaggaggaagctgctaaggactagttctgcccttctggcaccaggaaccctgggttgacgcggttctatctagttacgcgttaaaccaactagaaatttttt

SEQ ID NO: 1174 - DNA, 197 bp, Artificial Sequence
  Synthetic
gattcctggtgccagaaacagttttagagctagaaatagcaagttaaaataaggctagtccgttatcaacttgaaaaagtggcaccgagtcggtgcaggaggaagctgctaaggactagttctgcccttctggcaccaggagtgccagcttgacgcggttctatctagttacgcgttaaaccaactagaaatttttt

SEQ ID NO: 1175 - DNA, 181 bp, Artificial Sequence
  Synthetic
gtcatcttagtcattacctggttttagagctagaaatagcaagttaaaataaggctagtccgttatcaacttgaaaaagtggcaccgagtcggtgcaacgaacacctcatgtaatgactaagatgccccgacgttgacgcggttctatctagttacgcgttaaaccaactagaaatttttt

SEQ ID NO: 1176 - DNA, 181 bp, Artificial Sequence
  Synthetic
gtcatcttagtcattacctggttttagagctagaaatagcaagttaaaataaggctagtccgttatcaacttgaaaaagtggcaccgagtcggtgcaacgaacacctcatgtaatgactaagatgccccgctattgacgcggttctatctagttacgcgttaaaccaactagaaatttttt

SEQ ID NO: 1177 - DNA, 181 bp, Artificial Sequence
  Synthetic
gtcatcttagtcattacctggttttagagctagaaatagcaagttaaaataaggctagtccgttatcaacttgaaaaagtggcaccgagtcggtgcaacgaacacctcatgtaatgactaagatgcccactatttgacgcggttctatctagttacgcgttaaaccaactagaaatttttt

SEQ ID NO: 1178 - DNA, 181 bp, Artificial Sequence
  Synthetic
gtcatcttagtcattacctggttttagagctagaaatagcaagttaaaataaggctagtccgttatcaacttgaaaaagtggcaccgagtcggtgcaacgaacacctcatgtaatgactaagatgccccacacttgacgcggttctatctagttacgcgttaaaccaactagaaatttttt

SEQ ID NO: 1179 - DNA, 181 bp, Artificial Sequence
  Synthetic
gtcatcttagtcattacctggttttagagctagaaatagcaagttaaaataaggctagtccgttatcaacttgaaaaagtggcaccgagtcggtgcaacgaacacctcatgtaatgactaagatgcccacacgttgacgcggttctatctagttacgcgttaaaccaactagaaatttttt

SEQ ID NO: 1180 - DNA, 181 bp, Artificial Sequence
  Synthetic
gtcatcttagtcattacctggttttagagctagaaatagcaagttaaaataaggctagtccgttatcaacttgaaaaagtggcaccgagtcggtgcaacgaacacctcatgtaatgactaagatgtgacagatttgacgcggttctatctagttacgcgttaaaccaactagaaatttttt

SEQ ID NO: 1181 - DNA, 181 bp, Artificial Sequence
  Synthetic
gtcatcttagtcattacctggttttagagctagaaatagcaagttaaaataaggctagtccgttatcaacttgaaaaagtggcaccgagtcggtgcaacgaacacctcatgtaatgactaagatgacgacaaattgacgcggttctatctagttacgcgttaaaccaactagaaatttttt

SEQ ID NO: 1182 - DNA, 181 bp, Artificial Sequence
  Synthetic
gtcatcttagtcattacctggttttagagctagaaatagcaagttaaaataaggctagtccgttatcaacttgaaaaagtggcaccgagtcggtgcaacgaacacctcatgtaatgactaagatgacgtgacattgacgcggttctatctagttacgcgttaaaccaactagaaatttttt

SEQ ID NO: 1183 - DNA, 181 bp, Artificial Sequence
  Synthetic
gtcatcttagtcattacctggttttagagctagaaatagcaagttaaaataaggctagtccgttatcaacttgaaaaagtggcaccgagtcggtgcaacgaacacctcatgtaatgactaagatgtgacggacttgacgcggttctatctagttacgcgttaaaccaactagaaatttttt

SEQ ID NO: 1184 - DNA, 181 bp, Artificial Sequence
  Synthetic
gtcatcttagtcattacctggttttagagctagaaatagcaagttaaaataaggctagtccgttatcaacttgaaaaagtggcaccgagtcggtgcaacgaacacctcatgtaatgactaagatgacgggaatttgacgcggttctatctagttacgcgttaaaccaactagaaatttttt

SEQ ID NO: 1185 - DNA, 181 bp, Artificial Sequence
  Synthetic
gtcatcttagtcattacctggttttagagctagaaatagcaagttaaaataaggctagtccgttatcaacttgaaaaagtggcaccgagtcggtgcaacgaacacctcatgtaatgactaagatgtcgttacattgacgcggttctatctagttacgcgttaaaccaactagaaatttttt

SEQ ID NO: 1186 - DNA, 181 bp, Artificial Sequence
  Synthetic
gtcatcttagtcattacctggttttagagctagaaatagcaagttaaaataaggctagtccgttatcaacttgaaaaagtggcaccgagtcggtgcaacgaacacctcatgtaatgactaagatgatcattgcttgacgcggttctatctagttacgcgttaaaccaactagaaatttttt

SEQ ID NO: 1187 - DNA, 181 bp, Artificial Sequence
  Synthetic
gtcatcttagtcattacctggttttagagctagaaatagcaagttaaaataaggctagtccgttatcaacttgaaaaagtggcaccgagtcggtgcaacgaacacctcatgtaatgactaagatgcattgcgcttgacgcggttctatctagttacgcgttaaaccaactagaaatttttt

SEQ ID NO: 1188 - DNA, 181 bp, Artificial Sequence
  Synthetic
gtcatcttagtcattacctggttttagagctagaaatagcaagttaaaataaggctagtccgttatcaacttgaaaaagtggcaccgagtcggtgcaacgaacacctcatgtaatgactaagatgcattgcatttgacgcggttctatctagttacgcgttaaaccaactagaaatttttt

SEQ ID NO: 1189 - DNA, 182 bp, Artificial Sequence
  Synthetic
gagtccgagcagaagaagaagttttagagctagaaatagcaagttaaaataaggctagtccgttatcaacttgaaaaagtggcaccgagtcggtgcgtgatgggagcacttcttcttctgctcggaaagtaaatttgacgcggttctatctagttacgcgttaaaccaactagaaatttttt

SEQ ID NO: 1190 - DNA, 187 bp, Artificial Sequence
  Synthetic
gatgtctgcaggccagatgagttttagagctagaaatagcaagttaaaataaggctagtccgttatcaacttgaaaaagtggcaccgagtcggtgcaatgtgccatctggagcactcatctggcctgcagaaactagtcttgacgcggttctatctagttacgcgttaaaccaactagaaatttttt

SEQ ID NO: 1191 - DNA, 189 bp, Artificial Sequence
  Synthetic
ggcccagactgagcacgtgagttttagagctagaaatagcaagttaaaataaggctagtccgttatcaacttgaaaaagtggcaccgagtcggtgcttcctctgccatctcgtgctcagtctgtctctctcacacacacacttgacgcggttctatctagttacgcgttaaaccaactagaaatttttt

SEQ ID NO: 1192 - DNA, 203 bp, Artificial Sequence
  Synthetic
ggcccagactgagcacgtgagttttagagctagaaatagcaagttaaaataaggctagtccgttatcaacttgaaaaagtggcaccgagtcggtgcttcctctgccatctcgtgctcagtctgtctctctcacacacacacgggtcaggagccccccccctgaacccaggataaccctcaaagtcggggggcaaccctttttt

SEQ ID NO: 1193 - DNA, 200 bp, Artificial Sequence
  Synthetic
ggcccagactgagcacgtgagttttagagctagaaatagcaagttaaaataaggctagtccgttatcaacttgaaaaagtggcaccgagtcggtgcgccctctggaggaagcagggcttcccgtgctcagtctgtctctctcacacacacacttgacgcggttctatctagttacgcgttaaaccaactagaaatttttt

SEQ ID NO: 1194 - DNA, 214 bp, Artificial Sequence
  Synthetic
ggcccagactgagcacgtgagttttagagctagaaatagcaagttaaaataaggctagtccgttatcaacttgaaaaagtggcaccgagtcggtgcgccctctggaggaagcagggcttcccgtgctcagtctgtctctctcacacacacacgggtcaggagccccccccctgaacccaggataaccctcaaagtcggggggcaaccctttttt

SEQ ID NO: 1195 - DNA, 233 bp, Artificial Sequence
  Synthetic
ggcccagactgagcacgtgagttttagagctagaaatagcaagttaaaataaggctagtccgttatcaacttgaaaaagtggcaccgagtcggtgctggaggaagcagggcttcctttcctctgccatcacttatcgtcgtcatccttgtaatccgtgctcagtctgtctctctcacacacacacttgacgcggttctatctagttacgcgttaaaccaactagaaatttttt

SEQ ID NO: 1196 - DNA, 247 bp, Artificial Sequence
  Synthetic
ggcccagactgagcacgtgagttttagagctagaaatagcaagttaaaataaggctagtccgttatcaacttgaaaaagtggcaccgagtcggtgctggaggaagcagggcttcctttcctctgccatcacttatcgtcgtcatccttgtaatccgtgctcagtctgtctctctcacacacacacgggtcaggagccccccccctgaacccaggataaccctcaaagtcggggggcaaccctttttt

SEQ ID NO: 1197 - DNA, 192 bp, Artificial Sequence
  Synthetic
ggaatcccttctgcagcaccgttttagagctagaaatagcaagttaaaataaggctagtccgttatcaacttgaaaaagtggcaccgagtcggtgcggaaaagcgatcaaggtgctgcagaagggacaatcactacacacacacttgacgcggttctatctagttacgcgttaaaccaactagaaatttttt

SEQ ID NO: 1198 - DNA, 206 bp, Artificial Sequence
  Synthetic
ggaatcccttctgcagcaccgttttagagctagaaatagcaagttaaaataaggctagtccgttatcaacttgaaaaagtggcaccgagtcggtgcggaaaagcgatcaaggtgctgcagaagggacaatcactacacacacacgggtcaggagccccccccctgaacccaggataaccctcaaagtcggggggcaaccctttttt

SEQ ID NO: 1199 - DNA, 202 bp, Artificial Sequence
  Synthetic
ggaatcccttctgcagcaccgttttagagctagaaatagcaagttaaaataaggctagtccgttatcaacttgaaaaagtggcaccgagtcggtgctagtgcttgagaccgccagaagctcgggctgcagaagggacaatcactacacacacacttgacgcggttctatctagttacgcgttaaaccaactagaaatttttt

SEQ ID NO: 1200 - DNA, 216 bp, Artificial Sequence
  Synthetic
ggaatcccttctgcagcaccgttttagagctagaaatagcaagttaaaataaggctagtccgttatcaacttgaaaaagtggcaccgagtcggtgctagtgcttgagaccgccagaagctcgggctgcagaagggacaatcactacacacacacgggtcaggagccccccccctgaacccaggataaccctcaaagtcggggggcaaccctttttt

SEQ ID NO: 1201 - DNA, 192 bp, Artificial Sequence
  Synthetic
gagtccgagcagaagaagaagttttagagctagaaatagcaagttaaaataaggctagtccgttatcaacttgaaaaagtggcaccgagtcggtgcgtgatgggagcacttcttcttctgctcggaaacaatctacacacacacttgacgcggttctatctagttacgcgttaaaccaactagaaatttttt

SEQ ID NO: 1202 - DNA, 206 bp, Artificial Sequence
  Synthetic
gagtccgagcagaagaagaagttttagagctagaaatagcaagttaaaataaggctagtccgttatcaacttgaaaaagtggcaccgagtcggtgcgtgatgggagcacttcttcttctgctcggaaacaatctacacacacacgggtcaggagccccccccctgaacccaggataaccctcaaagtcggggggcaaccctttttt

SEQ ID NO: 1203 - DNA, 223 bp, Artificial Sequence
  Synthetic
gtcatcttagtcattacctggttttagagctagaaatagcaagttaaaataaggctagtccgttatcaacttgaaaaagtggcaccgagtcggtgctgagttacaacgaacacctcagcttatcgtcgtcatccttgtaatcgtaatgactaagatgtcatctctacacacacacttgacgcggttctatctagttacgcgttaaaccaactagaaatttttt

SEQ ID NO: 1204 - DNA, 237 bp, Artificial Sequence
  Synthetic
gtcatcttagtcattacctggttttagagctagaaatagcaagttaaaataaggctagtccgttatcaacttgaaaaagtggcaccgagtcggtgctgagttacaacgaacacctcagcttatcgtcgtcatccttgtaatcgtaatgactaagatgtcatctctacacacacacgggtcaggagccccccccctgaacccaggataaccctcaaagtcggggggcaaccctttttt

SEQ ID NO: 1205 - DNA, 202 bp, Artificial Sequence
  Synthetic
gtcatcttagtcattacctggttttagagctagaaatagcaagttaaaataaggctagtccgttatcaacttgaaaaagtggcaccgagtcggtgcatgggaactcagtttatatgagttagtaatgactaagatgtcatctctacacacacacttgacgcggttctatctagttacgcgttaaaccaactagaaatttttt

SEQ ID NO: 1206 - DNA, 216 bp, Artificial Sequence
  Synthetic
gtcatcttagtcattacctggttttagagctagaaatagcaagttaaaataaggctagtccgttatcaacttgaaaaagtggcaccgagtcggtgcatgggaactcagtttatatgagttagtaatgactaagatgtcatctctacacacacacgggtcaggagccccccccctgaacccaggataaccctcaaagtcggggggcaaccctttttt

SEQ ID NO: 1207 - DNA, 191 bp, Artificial Sequence
  Synthetic
gtcatcttagtcattacctggttttagagctagaaatagcaagttaaaataaggctagtccgttatcaacttgaaaaagtggcaccgagtcggtgcaacgaacacctcatgtaatgactaagatgtcatctctacacacacacttgacgcggttctatctagttacgcgttaaaccaactagaaatttttt

SEQ ID NO: 1208 - DNA, 205 bp, Artificial Sequence
  Synthetic
gtcatcttagtcattacctggttttagagctagaaatagcaagttaaaataaggctagtccgttatcaacttgaaaaagtggcaccgagtcggtgcaacgaacacctcatgtaatgactaagatgtcatctctacacacacacgggtcaggagccccccccctgaacccaggataaccctcaaagtcggggggcaaccctttttt

SEQ ID NO: 1209 - DNA, 202 bp, Artificial Sequence
  Synthetic
gcattttcaggaggaagcgagttttagagctagaaatagcaagttaaaataaggctagtccgttatcaacttgaaaaagtggcaccgagtcggtgctacgaaggaaatgactcaaatatgccttcctcctgaaaataactctctacacacacacttgacgcggttctatctagttacgcgttaaaccaactagaaatttttt

SEQ ID NO: 1210 - DNA, 216 bp, Artificial Sequence
  Synthetic
gcattttcaggaggaagcgagttttagagctagaaatagcaagttaaaataaggctagtccgttatcaacttgaaaaagtggcaccgagtcggtgctacgaaggaaatgactcaaatatgccttcctcctgaaaataactctctacacacacacgggtcaggagccccccccctgaacccaggataaccctcaaagtcggggggcaaccctttttt

SEQ ID NO: 1211 - DNA, 192 bp, Artificial Sequence
  Synthetic
gcattttcaggaggaagcgagttttagagctagaaatagcaagttaaaataaggctagtccgttatcaacttgaaaaagtggcaccgagtcggtgctgtctgaagcaatcgcttcctcctgaaaataactctctacacacacacttgacgcggttctatctagttacgcgttaaaccaactagaaatttttt

SEQ ID NO: 1212 - DNA, 206 bp, Artificial Sequence
  Synthetic
gcattttcaggaggaagcgagttttagagctagaaatagcaagttaaaataaggctagtccgttatcaacttgaaaaagtggcaccgagtcggtgctgtctgaagcaatcgcttcctcctgaaaataactctctacacacacacgggtcaggagccccccccctgaacccaggataaccctcaaagtcggggggcaaccctttttt

SEQ ID NO: 1213 - DNA, 179 bp, Artificial Sequence
  Synthetic
ggcccagactgagcacgtgagttttagagctagaaatagcaagttaaaataaggctagtccgttatcaacttgaaaaagtggcaccgagtcggtgcttcctctgccatctcgtgctcagtctgttaaatacttgacgcggttctatctagttacgcgttaaaccaactagaaatttttt

SEQ ID NO: 1214 - DNA, 193 bp, Artificial Sequence
  Synthetic
ggcccagactgagcacgtgagttttagagctagaaatagcaagttaaaataaggctagtccgttatcaacttgaaaaagtggcaccgagtcggtgcttcctctgccatctcgtgctcagtctgttaaatacgggtcaggagccccccccctgaacccaggataaccctcaaagtcggggggcaaccctttttt

SEQ ID NO: 1215 - DNA, 181 bp, Artificial Sequence
  Synthetic
gtcatcttagtcattacctggttttagagctagaaatagcaagttaaaataaggctagtccgttatcaacttgaaaaagtggcaccgagtcggtgcaacgaacacctcatgtaatgactaagatgtttaaagattgacgcggttctatctagttacgcgttaaaccaactagaaatttttt

SEQ ID NO: 1216 - DNA, 195 bp, Artificial Sequence
  Synthetic
gtcatcttagtcattacctggttttagagctagaaatagcaagttaaaataaggctagtccgttatcaacttgaaaaagtggcaccgagtcggtgcaacgaacacctcatgtaatgactaagatgtttaaagagggtcaggagccccccccctgaacccaggataaccctcaaagtcggggggcaaccctttttt

SEQ ID NO: 1217 - DNA, 177 bp, Artificial Sequence
  Synthetic
gattcctggtgccagaaacagttttagagctagaaatagcaagttaaaataaggctagtccgttatcaacttgaaaaagtggcaccgagtcggtgcgtcaccactgtttctggcaccaggacctaaatattgacgcggttctatctagttacgcgttaaaccaactagaaatttttt

SEQ ID NO: 1218 - DNA, 191 bp, Artificial Sequence
  Synthetic
gattcctggtgccagaaacagttttagagctagaaatagcaagttaaaataaggctagtccgttatcaacttgaaaaagtggcaccgagtcggtgcgtcaccactgtttctggcaccaggacctaaattgggtcaggagccccccccctgaacccaggataaccctcaaagtcggggggcaaccctttttt

SEQ ID NO: 1219 - DNA, 196 bp, Artificial Sequence
  Synthetic
gcattttcaggaggaagcgagttttagagctagaaatagcaagttaaaataaggctagtccgttatcaacttgaaaaagtggcaccgagtcggtgctgtctgaagcaatcgcttcctcctgaaaataaaccaacgggtcaggagccccccccctgaacccaggataaccctcaaagtcggggggcaaccctttttt

SEQ ID NO: 1220 - DNA, 182 bp, Artificial Sequence
  Synthetic
gcattttcaggaggaagcgagttttagagctagaaatagcaagttaaaataaggctagtccgttatcaacttgaaaaagtggcaccgagtcggtgctgtctgaagcaatcgcttcctcctgaaaataaacacttttgacgcggttctatctagttacgcgttaaaccaactagaaatttttt

SEQ ID NO: 1221 - RNA, 123 nt, Artificial Sequence
  Synthetic
ggcccagacugagcacgugaguuuuagagcuagaaauagcaaguuaaaauaaggcuaguccguuaucaacuugaaaaaguggcaccgagucggugcuuccucugccaucucgugcucagucug

SEQ ID NO: 1222 - RNA, 168 nt, Artificial Sequence
  Synthetic
ggcccagacugagcacgugaguuuuagagcuagaaauagcaaguuaaaauaaggcuaguccguuaucaacuugaaaaaguggcaccgagucggugcuuccucugccaucucgugcucagucugucucucuccgcgguucuaucuaguuacgcguuaaaccaacuagaa

SEQ ID NO: 1223 - RNA, 123 nt, Artificial Sequence
  Synthetic
ggcccagacugagcacgugaguuuuagagcuagaaauagcaaguuaaaauaaggcuaguccguuaucaacuugaaaaaguggcaccgagucggugcgaagcagggcuucccgugcucagucug

SEQ ID NO: 1224 - RNA, 168 nt, Artificial Sequence
  Synthetic
ggcccagacugagcacgugaguuuuagagcuagaaauagcaaguuaaaauaaggcuaguccguuaucaacuugaaaaaguggcaccgagucggugcgaagcagggcuucccgugcucagucugucucucuccgcgguucuaucuaguuacgcguuaaaccaacuagaa

SEQ ID NO: 1225 - RNA, 125 nt, Artificial Sequence
  Synthetic
gucaucuuagucauuaccugguuuuagagcuagaaauagcaaguuaaaauaaggcuaguccguuaucaacuugaaaaaguggcaccgagucggugcaacgaacaccucauguaaugacuaagaug

SEQ ID NO: 1226 - RNA, 170 nt, Artificial Sequence
  Synthetic
gucaucuuagucauuaccugguuuuagagcuagaaauagcaaguuaaaauaaggcuaguccguuaucaacuugaaaaaguggcaccgagucggugcaacgaacaccucauguaaugacuaagaugucaucucucgcgguucuaucuaguuacgcguuaaaccaacuagaa

SEQ ID NO: 1227 - RNA, 136 nt, Artificial Sequence
  Synthetic
gucaucuuagucauuaccugguuuuagagcuagaaauagcaaguuaaaauaaggcuaguccguuaucaacuugaaaaaguggcaccgagucggugcaugggaacucaguuuauaugaguuaguaaugacuaagaug

SEQ ID NO: 1228 - RNA, 181 nt, Artificial Sequence
  Synthetic
gucaucuuagucauuaccugguuuuagagcuagaaauagcaaguuaaaauaaggcuaguccguuaucaacuugaaaaaguggcaccgagucggugcaugggaacucaguuuauaugaguuaguaaugacuaagaugucaucucucgcgguucuaucuaguuacgcguuaaaccaacuagaa

SEQ ID NO: 1229 - RNA, 131 nt, Artificial Sequence
  Synthetic
gauuccuggugccagaaacaguuuuagagcuagaaauagcaaguuaaaauaaggcuaguccguuaucaacuugaaaaaguggcaccgagucggugcugcuaaggacuaguucugcccuucuggcaccagga

SEQ ID NO: 1230 - RNA, 176 nt, Artificial Sequence
  Synthetic
gauuccuggugccagaaacaguuuuagagcuagaaauagcaaguuaaaauaaggcuaguccguuaucaacuugaaaaaguggcaccgagucggugcugcuaaggacuaguucugcccuucuggcaccaggaccucuucucgcgguucuaucuaguuacgcguuaaaccaacuagaa

SEQ ID NO: 1231 - RNA, 126 nt, Artificial Sequence
  Synthetic
gcauuuucaggaggaagcgaguuuuagagcuagaaauagcaaguuaaaauaaggcuaguccguuaucaacuugaaaaaguggcaccgagucggugcugucugaagcaaucgcuuccuccugaaaau

SEQ ID NO: 1232 - RNA, 171 nt, Artificial Sequence
  Synthetic
gcauuuucaggaggaagcgaguuuuagagcuagaaauagcaaguuaaaauaaggcuaguccguuaucaacuugaaaaaguggcaccgagucggugcugucugaagcaaucgcuuccuccugaaaauaacucucucgcgguucuaucuaguuacgcguuaaaccaacuagaa

SEQ ID NO: 1233 - RNA, 126 nt, Artificial Sequence
  Synthetic
gaguccgagcagaagaagaaguuuuagagcuagaaauagcaaguuaaaauaaggcuaguccguuaucaacuugaaaaaguggcaccgagucggugcgugaugggagcacuucuucuucugcucgga

SEQ ID NO: 1234 - RNA, 171 nt, Artificial Sequence
  Synthetic
gaguccgagcagaagaagaaguuuuagagcuagaaauagcaaguuaaaauaaggcuaguccguuaucaacuugaaaaaguggcaccgagucggugcgugaugggagcacuucuucuucugcucggaaacaaucucgcgguucuaucuaguuacgcguuaaaccaacuagaa

SEQ ID NO: 1235 - DNA, 58 bp, Artificial Sequence
  Synthetic
  misc_feature (34)..(37): n is a, c, g, or t
acactctttccctacacgacgctcttccgatctnnnntggcaagacaaacagtagtgg

SEQ ID NO: 1236 - DNA, 53 bp, Artificial Sequence
  Synthetic
tggagttcagacgtgtgctcttccgatctactaattggttgtcctgcatactt

SEQ ID NO: 1237 - DNA, 57 bp, Artificial Sequence
  Synthetic
  misc_feature (34)..(37): n is a, c, g, or t
acactctttccctacacgacgctcttccgatctnnnntgggtgttggacagtgtagc

SEQ ID NO: 1238 - DNA, 53 bp, Artificial Sequence
  Synthetic
tggagttcagacgtgtgctcttccgatctgtagaaggactgaagagtgagagg

SEQ ID NO: 1239 - DNA, 55 bp, Artificial Sequence
  Synthetic
  misc_feature (34)..(37): n is a, c, g, or t
acactctttccctacacgacgctcttccgatctnnnngaggcagtgggggatggt

SEQ ID NO: 1240 - DNA, 49 bp, Artificial Sequence
  Synthetic
tggagttcagacgtgtgctcttccgatctgaaagccaggaggtcacagg

SEQ ID NO: 1241 - DNA, 57 bp, Artificial Sequence
  Synthetic
  misc_feature (34)..(37): n is a, c, g, or t
acactctttccctacacgacgctcttccgatctnnnncccattcactgtctgcacct

SEQ ID NO: 1242 - DNA, 49 bp, Artificial Sequence
  Synthetic
tggagttcagacgtgtgctcttccgatctctggggtgacaagagttgca

SEQ ID NO: 1243 - DNA, 57 bp, Artificial Sequence
  Synthetic
  misc_feature (34)..(37): n is a, c, g, or t
acactctttccctacacgacgctcttccgatctnnnngcccagggacaaagtacctc

SEQ ID NO: 1244 - DNA, 51 bp, Artificial Sequence
  Synthetic
tggagttcagacgtgtgctcttccgatctagatgggaagtacctactggta

SEQ ID NO: 1245 - DNA, 55 bp, Artificial Sequence
  Synthetic
  misc_feature (34)..(37): n is a, c, g, or t
acactctttccctacacgacgctcttccgatctnnnnttgtccaggccgtgcagc

SEQ ID NO: 1246 - DNA, 49 bp, Artificial Sequence
  Synthetic
tggagttcagacgtgtgctcttccgatctgacatgacctcagggatgcc

SEQ ID NO: 1247 - DNA, 61 bp, Artificial Sequence
  Synthetic
  misc_feature (34)..(37): n is a, c, g, or t
acactctttccctacacgacgctcttccgatctnnnntcccttgtattctgttagtcctga

SEQ ID NO: 1248 - DNA, 51 bp, Artificial Sequence
  Synthetic
tggagttcagacgtgtgctcttccgatcttggagactgcttttccatttct

SEQ ID NO: 1249 - DNA, 58 bp, Artificial Sequence
  Synthetic
  misc_feature (34)..(37): n is a, c, g, or t
acactctttccctacacgacgctcttccgatctnnnncacaacagcttcatgtcagcc

SEQ ID NO: 1250 - DNA, 52 bp, Artificial Sequence
  Synthetic
tggagttcagacgtgtgctcttccgatctacgttaatgtttcctgatggtcc

SEQ ID NO: 1251 - DNA, 62 bp, Artificial Sequence
  Synthetic
  misc_feature (34)..(37): n is a, c, g, or t
acactctttccctacacgacgctcttccgatctnnnngtggggagatttgcatctgtggagg

SEQ ID NO: 1252 - DNA, 55 bp, Artificial Sequence
  Synthetic
tggagttcagacgtgtgctcttccgatctgcttttataccatcttggggttacag

SEQ ID NO: 1253 - DNA, 57 bp, Artificial Sequence
  Synthetic
  misc_feature (34)..(37): n is a, c, g, or t
acactctttccctacacgacgctcttccgatctnnnnttgaaatctcacctgggcga

SEQ ID NO: 1254 - DNA, 51 bp, Artificial Sequence
  Synthetic
tggagttcagacgtgtgctcttccgatctggcctttgtaggaaaacaccat

SEQ ID NO: 1255 - DNA, 59 bp, Artificial Sequence
  Synthetic
  misc_feature (34)..(37): n is a, c, g, or t
acactctttccctacacgacgctcttccgatctnnnngagaaggaggtgcaggagctag

SEQ ID NO: 1256 - DNA, 52 bp, Artificial Sequence
  Synthetic
tggagttcagacgtgtgctcttccgatctctcgtcctgctctcacttagact

SEQ ID NO: 1257 - DNA, 60 bp, Artificial Sequence
  Synthetic
  misc_feature (34)..(37): n is a, c, g, or t
acactctttccctacacgacgctcttccgatctnnnngtagttctgacattcctcctgag

SEQ ID NO: 1258 - DNA, 51 bp, Artificial Sequence
  Synthetic
tggagttcagacgtgtgctcttccgatcttcaaacaaggtgcagatacagc

SEQ ID NO: 1259 - DNA, 57 bp, Artificial Sequence
  Synthetic
  misc_feature (34)..(37): n is a, c, g, or t
acactctttccctacacgacgctcttccgatctnnnncagctcagcctgagtgttga

SEQ ID NO: 1260 - DNA, 48 bp, Artificial Sequence
  Synthetic
tggagttcagacgtgtgctcttccgatctctcgtgggtttgtggttgc

SEQ ID NO: 1261 - DNA, 57 bp, Artificial Sequence
  Synthetic
  misc_feature (34)..(37): n is a, c, g, or t
acactctttccctacacgacgctcttccgatctnnnntagtcgccttagcactgggt

SEQ ID NO: 1262 - DNA, 51 bp, Artificial Sequence
  Synthetic
tggagttcagacgtgtgctcttccgatctgttggtgtcaatacaactcccc

SEQ ID NO: 1263 - DNA, 55 bp, Artificial Sequence
  Synthetic
  misc_feature (34)..(37): n is a, c, g, or t
acactctttccctacacgacgctcttccgatctnnnncctctggcgaacatggcg

SEQ ID NO: 1264 - DNA, 50 bp, Artificial Sequence
  Synthetic
tggagttcagacgtgtgctcttccgatctgtcaggaatttccagctccct

SEQ ID NO: 1265 - DNA, 57 bp, Artificial Sequence
  Synthetic
  misc_feature (34)..(37): n is a, c, g, or t
acactctttccctacacgacgctcttccgatctnnnnaggcagccaaggaatcctca

SEQ ID NO: 1266 - DNA, 50 bp, Artificial Sequence
  Synthetic
tggagttcagacgtgtgctcttccgatctgacctctgacctccacaactg

SEQ ID NO: 1267 - DNA, 57 bp, Artificial Sequence
  Synthetic
  misc_feature (34)..(37): n is a, c, g, or t
acactctttccctacacgacgctcttccgatctnnnnctggaaggactcaggcagga

SEQ ID NO: 1268 - DNA, 49 bp, Artificial Sequence
  Synthetic
tggagttcagacgtgtgctcttccgatctaacgcgttcactctgagcat

SEQ ID NO: 1269 - DNA, 59 bp, Artificial Sequence
  Synthetic
  misc_feature (34)..(37): n is a, c, g, or t
acactctttccctacacgacgctcttccgatctnnnnagacgctgggagattgacatgc

SEQ ID NO: 1270 - DNA, 50 bp, Artificial Sequence
  Synthetic
tggagttcagacgtgtgctcttccgatctcgatggatgtggcgcaggtag

SEQ ID NO: 1271 - DNA, 57 bp, Artificial Sequence
  Synthetic
  misc_feature (34)..(37): n is a, c, g, or t
acactctttccctacacgacgctcttccgatctnnnntcccctgttgacctggagaa

SEQ ID NO: 1272 - DNA, 49 bp, Artificial Sequence
  Synthetic
tggagttcagacgtgtgctcttccgatctcactgtacttgccctgacca

SEQ ID NO: 1273 - DNA, 57 bp, Artificial Sequence
  Synthetic
  misc_feature (34)..(37): n is a, c, g, or t
acactctttccctacacgacgctcttccgatctnnnnttggtgttgacagggagcaa

SEQ ID NO: 1274 - DNA, 49 bp, Artificial Sequence
  Synthetic
tggagttcagacgtgtgctcttccgatctctgagatgtgggcagaaggg

SEQ ID NO: 1275 - DNA, 57 bp, Artificial Sequence
  Synthetic
  misc_feature (34)..(37): n is a, c, g, or t
acactctttccctacacgacgctcttccgatctnnnntgagagggaacagaagggct

SEQ ID NO: 1276 - DNA, 49 bp, Artificial Sequence
  Synthetic
tggagttcagacgtgtgctcttccgatctgtccaaaggcccaagaacct

SEQ ID NO: 1277 - DNA, 58 bp, Artificial Sequence
  Synthetic
  misc_feature (34)..(37): n is a, c, g, or t
acactctttccctacacgacgctcttccgatctnnnntcctagcactttggaaggtcg

SEQ ID NO: 1278 - DNA, 51 bp, Artificial Sequence
  Synthetic
tggagttcagacgtgtgctcttccgatctgctcatcttaatctgctcagcc

SEQ ID NO: 1279 - DNA, 60 bp, Artificial Sequence
  Synthetic
  misc_feature (34)..(37): n is a, c, g, or t
acactctttccctacacgacgctcttccgatctnnnncagggaaacgcccatgcaattag

SEQ ID NO: 1280 - DNA, 51 bp, Artificial Sequence
  Synthetic
tggagttcagacgtgtgctcttccgatctctctgttgagctcgaccctgaa

SEQ ID NO: 1281 - DNA, 57 bp, Artificial Sequence
  Synthetic
  misc_feature (34)..(37): n is a, c, g, or t
acactctttccctacacgacgctcttccgatctnnnncatacaggtgtggcgagagg

SEQ ID NO: 1282 - DNA, 49 bp, Artificial Sequence
  Synthetic
tggagttcagacgtgtgctcttccgatctccagcctcctttggttagca

SEQ ID NO: 1283 - DNA, 59 bp, Artificial Sequence
  Synthetic
  misc_feature (34)..(37): n is a, c, g, or t
acactctttccctacacgacgctcttccgatctnnnntcctgatgatgaagctgatgaa

SEQ ID NO: 1284 - DNA, 52 bp, Artificial Sequence
  Synthetic
tggagttcagacgtgtgctcttccgatctcatgctttgtgattaggtgtctt

SEQ ID NO: 1285 - DNA, 57 bp, Artificial Sequence
  Synthetic
  misc_feature (34)..(37): n is a, c, g, or t
acactctttccctacacgacgctcttccgatctnnnntccccatacttagggccctt

SEQ ID NO: 1286 - DNA, 49 bp, Artificial Sequence
  Synthetic
tggagttcagacgtgtgctcttccgatctccatctcccgctccttttcc

SEQ ID NO: 1287 - DNA, 57 bp, Artificial Sequence
  Synthetic
  misc_feature (34)..(37): n is a, c, g, or t
acactctttccctacacgacgctcttccgatctnnnngcctttcgctctaaagtgga

SEQ ID NO: 1288 - DNA, 49 bp, Artificial Sequence
  Synthetic
tggagttcagacgtgtgctcttccgatcttttgggagatttgggcttct

SEQ ID NO: 1289 - DNA, 57 bp, Artificial Sequence
  Synthetic
  misc_feature (34)..(37): n is a, c, g, or t
acactctttccctacacgacgctcttccgatctnnnncaggccattcccaagaaacg

SEQ ID NO: 1290 - DNA, 49 bp, Artificial Sequence
  Synthetic
tggagttcagacgtgtgctcttccgatctccttgacctcgatgctgacc

SEQ ID NO: 1291 - DNA, 62 bp, Artificial Sequence
  Synthetic
  misc_feature (34)..(37): n is a, c, g, or t
acactctttccctacacgacgctcttccgatctnnnncacattctgcctcctaaacatttca

SEQ ID NO: 1292 - DNA, 49 bp, Artificial Sequence
  Synthetic
tggagttcagacgtgtgctcttccgatctagaacacatcccacagtgca

SEQ ID NO: 1293 - DNA, 57 bp, Artificial Sequence
  Synthetic
  misc_feature (34)..(37): n is a, c, g, or t
acactctttccctacacgacgctcttccgatctnnnngcctggcgtctctttggaaa

SEQ ID NO: 1294 - DNA, 50 bp, Artificial Sequence
  Synthetic
tggagttcagacgtgtgctcttccgatctctgctcagaggcatacagtga

SEQ ID NO: 1295 - DNA, 62 bp, Artificial Sequence
  Synthetic
  misc_feature (34)..(37): n is a, c, g, or t
acactctttccctacacgacgctcttccgatctnnnngctaaaagctgaagtaatagcaaag

SEQ ID NO: 1296 - DNA, 49 bp, Artificial Sequence
  Synthetic
tggagttcagacgtgtgctcttccgatctcccatgggcactgacagtta

SEQ ID NO: 1297 - DNA, 58 bp, Artificial Sequence
  Synthetic
  misc_feature (34)..(37): n is a, c, g, or t
acactctttccctacacgacgctcttccgatctnnnntcctaacctggacttgaacgt

SEQ ID NO: 1298 - DNA, 49 bp, Artificial Sequence
  Synthetic
tggagttcagacgtgtgctcttccgatctggaaacaaagagggcatggc

SEQ ID NO: 1299 - DNA, 57 bp, Artificial Sequence
  Synthetic
  misc_feature (34)..(37): n is a, c, g, or t
acactctttccctacacgacgctcttccgatctnnnngggaagtttgcctggctagt

SEQ ID NO: 1300 - DNA, 52 bp, Artificial Sequence
  Synthetic
tggagttcagacgtgtgctcttccgatctaccacctttgtcagaagtcaact

SEQ ID NO: 1301 - DNA, 57 bp, Artificial Sequence
  Synthetic
  misc_feature (34)..(37): n is a, c, g, or t
acactctttccctacacgacgctcttccgatctnnnngggatatagggctgcctgga

SEQ ID NO: 1302 - DNA, 49 bp, Artificial Sequence
  Synthetic
tggagttcagacgtgtgctcttccgatctccagagtcgcagagcttcac

SEQ ID NO: 1303 - DNA, 57 bp, Artificial Sequence
  Synthetic
  misc_feature (34)..(37): n is a, c, g, or t
acactctttccctacacgacgctcttccgatctnnnncctacgccgtagacaacacg

SEQ ID NO: 1304 - DNA, 47 bp, Artificial Sequence
  Synthetic
tggagttcagacgtgtgctcttccgatctagcccttgaccctcccca

SEQ ID NO: 1305 - DNA, 58 bp, Artificial Sequence
  Synthetic
  misc_feature (34)..(37): n is a, c, g, or t
acactctttccctacacgacgctcttccgatctnnnnagcatctggtgactttccttt

SEQ ID NO: 1306 - DNA, 49 bp, Artificial Sequence
  Synthetic
tggagttcagacgtgtgctcttccgatctgtccactcttcagcagtccc

SEQ ID NO: 1307 - DNA, 55 bp, Artificial Sequence
  Synthetic
  misc_feature (34)..(37): n is a, c, g, or t
acactctttccctacacgacgctcttccgatctnnnnctgtccccatggaaggcc

SEQ ID NO: 1308 - DNA, 51 bp, Artificial Sequence
  Synthetic
tggagttcagacgtgtgctcttccgatctgctccatctggtttgaaaaggt

SEQ ID NO: 1309 - DNA, 57 bp, Artificial Sequence
  Synthetic
  misc_feature (34)..(37): n is a, c, g, or t
acactctttccctacacgacgctcttccgatctnnnngtcagtggaacaagccgagt

SEQ ID NO: 1310 - DNA, 49 bp, Artificial Sequence
  Synthetic
tggagttcagacgtgtgctcttccgatctacttggttggggtaacggtg

SEQ ID NO: 1311 - DNA, 60 bp, Artificial Sequence
  Synthetic
  misc_feature (34)..(37): n is a, c, g, or t
acactctttccctacacgacgctcttccgatctnnnnacaacagttttagcctcagtagg

SEQ ID NO: 1312 - DNA, 50 bp, Artificial Sequence
  Synthetic
tggagttcagacgtgtgctcttccgatctagctgagtctacacagtagca

SEQ ID NO: 1313 - DNA, 57 bp, Artificial Sequence
  Synthetic
  misc_feature (34)..(37): n is a, c, g, or t
acactctttccctacacgacgctcttccgatctnnnngccaacaggtttccaggaga

SEQ ID NO: 1314 - DNA, 49 bp, Artificial Sequence
  Synthetic
tggagttcagacgtgtgctcttccgatctctgtagtcaccagtgccagg

SEQ ID NO: 1315 - DNA, 57 bp, Artificial Sequence
  Synthetic
  misc_feature (34)..(37): n is a, c, g, or t
acactctttccctacacgacgctcttccgatctnnnnacgtctcatatgccccttgg

SEQ ID NO: 1316 - DNA, 51 bp, Artificial Sequence
  Synthetic
tggagttcagacgtgtgctcttccgatctacgtaggaattttggtgggaca

SEQ ID NO: 1317 - DNA, 58 bp, Artificial Sequence
  Synthetic
  misc_feature (34)..(37): n is a, c, g, or t
acactctttccctacacgacgctcttccgatctnnnnacaaacaagacagggaactgg

SEQ ID NO: 1318 - DNA, 50 bp, Artificial Sequence
  Synthetic
tggagttcagacgtgtgctcttccgatctctagaggggtgaggctgaaac

SEQ ID NO: 1319 - DNA, 57 bp, Artificial Sequence
  Synthetic
  misc_feature (34)..(37): n is a, c, g, or t
acactctttccctacacgacgctcttccgatctnnnngacctgaccagtttcctgct

SEQ ID NO: 1320 - DNA, 50 bp, Artificial Sequence
  Synthetic
tggagttcagacgtgtgctcttccgatctacccttggtttgactttgcag

SEQ ID NO: 1321 - DNA, 55 bp, Artificial Sequence
  Synthetic
  misc_feature (34)..(37): n is a, c, g, or t
acactctttccctacacgacgctcttccgatctnnnntgtccagtccgtaaccgc

SEQ ID NO: 1322 - DNA, 53 bp, Artificial Sequence
  Synthetic
tggagttcagacgtgtgctcttccgatctctgtatctgaacatttccccagaa

SEQ ID NO: 1323 - DNA, 57 bp, Artificial Sequence
  Synthetic
  misc_feature (34)..(37): n is a, c, g, or t
acactctttccctacacgacgctcttccgatctnnnnacctctccccactgcacatt

SEQ ID NO: 1324 - DNA, 49 bp, Artificial Sequence
  Synthetic
tggagttcagacgtgtgctcttccgatctttgggcttgggctctctaga

SEQ ID NO: 1325 - DNA, 57 bp, Artificial Sequence
  Synthetic
  misc_feature (34)..(37): n is a, c, g, or t
acactctttccctacacgacgctcttccgatctnnnnaatgatgatcgctccgtggc

SEQ ID NO: 1326 - DNA, 52 bp, Artificial Sequence
  Synthetic
tggagttcagacgtgtgctcttccgatctggtctttggatctgcatatgtcc

SEQ ID NO: 1327 - DNA, 59 bp, Artificial Sequence
  Synthetic
  misc_feature (34)..(37): n is a, c, g, or t
acactctttccctacacgacgctcttccgatctnnnnacttggtgccaaattcttctcc

SEQ ID NO: 1328 - DNA, 50 bp, Artificial Sequence
  Synthetic
tggagttcagacgtgtgctcttccgatctaaagagggaatgggctttgga

SEQ ID NO: 1329 - DNA, 335 bp, Artificial Sequence
  Synthetic
cagggaaacgcccatgcaattagtctatttctgctgcaagtaagcatgcatttgtaggcttgatgctttttttctgcttctccagccctggcctgggtcaatccttggggcccagactgagcacgtgatggcagaggaaaggaagccctgcttcctccagagggcgtcgcaggacagcttttcctagacaggggctagtatgtgcagctcctgcaccgggatactggttgacaagtttggctgggctggaagccagcacctagggaggtccctggaaggggccagcctcaccaggagaggagggacctggcccttcagggtcgagctcaacagag

SEQ ID NO: 1330 - DNA, 218 bp, Artificial Sequence
  Synthetic
acgtctcatatgccccttggcagtcatcttagtcattacctgaggtgttcgttgtaactcatataaactgagttcccatgttttgcttaatggttgagttccgtttgtctgcacagcctgagacattgctggaaataaagaagagagaaaaacaattttagtatttggaagggaagtgctatggtctgaatgtatgtgtcccaccaaaattcctacgt

SEQ ID NO: 1331 - DNA, 277 bp, Artificial Sequence
  Synthetic
cagctcagcctgagtgttgaggccccagtggctgctctgggggcctcctgagtttctcatctgtgcccctccctccctggcccaggtgaaggtgtggttccagaaccggaggacaaagtacaaacggcagaagctggaggaggaagggcctgagtccgagcagaagaagaagggctcccatcacatcaaccggtggcgcattgccacgaagcaggccaatggggaggacatcgatgtcacctccaatgactagggtgggcaaccacaaacccacgag

SEQ ID NO: 1332 - DNA, 271 bp, Artificial Sequence
  Synthetic
agacgctgggagattgacatgcatttcgaccaatagcattgcagagaggcgtatcatttcgcggatgttccaatcagtacgcagagagtcgccgtctccaaggtgaaagcggaagtagggccttcgcgcacctcatggaatcccttctgcagcacctggatcgcttttccgagcttctggcggtctcaagcactacctacgtcagcacctgggaccccgccaccgtgcgccgggccttgcagtgggcgcgctacctgcgccacatccatcg

SEQ ID NO: 1333 - DNA, 288 bp, Artificial Sequence
  Synthetic
acaaacaagacagggaactggcaggcaccgaggcatctctgcaccgaggtgaaacaagctgccatttcattacaggcaaagctgagcaaaagtagatattacaagaccagcatgtactcacctctcatgaagcactgtgggtacgaaggaaatgactcaaatatgctgtctgaagccatcgcttcctcctgaaaatgcaccctcttctgaaggcgggggactcaatgatttcttttaccttcggagcgaaaaccaagacaggtcactgtttcagcctcacccctctag

SEQ ID NO: 1334 - DNA, 285 bp, Artificial Sequence
  Synthetic
acttggtgccaaattcttctcccctgggaagcatccctggacacttcccaaaggaccccagtcactccagcctgttggctgccgctcactttgatgtctgcaggccagatgagggctccagatggcacattgtcagagggacacactgtggcccctgtgcccagccctgggctctctgtacatgaagcaactccagtcccaaatatgtagctgtttgggaggtcagaaatagggggtccaggagcaaactccccccaccccctttccaaagcccattccctcttt

SEQ ID NO: 1335 - DNA, 193 bp, Artificial Sequence
  Synthetic
gtcagtggaacaagccgagtaagccaaaaaccaacatgaagcacatggctggtgctgcagcagctggggcagtggtggggggccttggcggctacatgctgggaagtgccatgagcaggcccatcatacatttcggcagtgactatgaggaccgttactatcgtgaaaacatgcaccgttaccccaaccaagt

SEQ ID NO: 1336 - DNA, 208 bp, Artificial Sequence
  Synthetic
ccagcctcctttggttagcaaggagagctctctgctttcaccttcaaatgccaggggttccactatgtagaaatccttccagtcagggccataggatatacggttcaggtaccagggggcagagagaagggcccggaagccggccttggtgaccagttccagctccttcatatagttcactggaatatcctctcgccacacctgtatg

SEQ ID NO: 1337 - DNA, 275 bp, Artificial Sequence
  Synthetic
gcccagggacaaagtacctcaagtcaaacagcagatctcagcagaaccgccactcattcatggaaagctctcaaagcaaagctgggacactgcagcccaatgaaaagcagagtcggcatagctatattgacacaattccccagtcctctaggagtccctcctacaggaccaaggccaaaagccatggggcactgagtgactccaagtctgtgagcaacctttctgaagccagggcccaaattgcggagcccagtaccagtaggtacttcccatct

SEQ ID NO: 1338 - DNA, 275 bp, Artificial Sequence
  Synthetic
cacaacagcttcatgtcagccaaggccacaaacaccatgtaccacacatgtgaacggacagattgacatgttaaaaacacaacatcagtgcatgttggggattcctggtgccagaaacaggggtgacgggagggcagaactagtccttagcagcttcctcctcctttattttagctgaagggaaataaaaggaaaagtcactctggggaacacgcccggtgtcacgccacttgacaggcgagtaacagacatggaccatcaggaaacattaacgt

SEQ ID NO: 1339 - DNA, 186 bp, Artificial Sequence
  Synthetic
gtagaaggactgaagagtgagaggagctcccagggcctggaaaggccactttgtaagctcattcttggggtcctgtggctctgtacctgtggctggctgcagtcagtagtggctgtgggggatctggggtatcaggtaggtgtccagctcctggcactggtagagtgctacactgtccaacaccca

SEQ ID NO: 1340 - DNA, 156 bp, Artificial Sequence
  Synthetic
tcccttgtattctgttagtcctgagatgcctgaaaatgaagccaccttcgcaataactgctggaggaattggggatgccaaggagtaggtggtgaattgatgcaaattgcttcttagtgcttattaggagctgaagaaatggaaaagcagtctcca

SEQ ID NO: 1341 - DNA, 123 bp, Artificial Sequence
  Synthetic
tcctgatgatgaagctgatgaaatgaagtctttattgggaatatttgatggtattttctaaaacaaacaaatactttttatattgataagagaaagaataaagacacctaatcacaaagcatg

SEQ ID NO: 1342 - DNA, 126 bp, Artificial Sequence
  Synthetic
cacattctgcctcctaaacatttcacagaagatggaaatatcctgcagcttgctaacctgcctgatctatacaaagtctttgagaggtgttaaatatggttatttatgcactgtgggatgtgttct

SEQ ID NO: 1343 - DNA, 139 bp, Artificial Sequence
  Synthetic
ctgctcagaggcatacagtgaacatccctttgttccttttagaccagtgattctgttctcatggtggctcacagggaggcatggattgctgcaggctctgccttgtatcacactctgcttttccaaagagacgccaggc

SEQ ID NO: 1344 - DNA, 187 bp, Artificial Sequence
  Synthetic
cccatgggcactgacagttaacactatggaaaaagggttaatataaaacaatataaaactattacagacaatagcttatcaatattaccttcattccattactgggatttttcacgtagtaacttttattcgtgaaatgatttcatttacaaagctattattctttgctattacttcagcttttagc

SEQ ID NO: 1345 - DNA, 133 bp, Artificial Sequence
  Synthetic
ggaaacaaagagggcatggcagcccaccggagtctcaggaggctggggaggacactggaaggactctcagaggatgctggtggcagcaggcagcacttcctggctcatgaaaacgttcaagtccaggttagga

SEQ ID NO: 1346 - DNA, 128 bp, Artificial Sequence
  Synthetic
gggaagtttgcctggctagtgaaaggtcaactgtagatgctgaagctgtccataaattgctgactttgattaaggaattatagactgactacattggaagctttgagttgacttctgacaaaggtggt

SEQ ID NO: 1347 - DNA, 182 bp, Artificial Sequence
  Synthetic
agcatctggtgactttccttttaaggtacggcggcgaagtgctaaaagggaacggcgatgaacaaatgtaattaataactttctctgtgaaagctttggaaaaatctttttttttttttttggtcaagcttgaggctgaataaagcctttgatgcacaaaatgggactgctgaagagtggac

SEQ ID NO: 1348 - DNA, 230 bp, Artificial Sequence
  Synthetic
gctccatctggtttgaaaaggttctcaagatcacttttaaatgggtgtgatgtgtattttttttaagtagcaggttcattttaaaacaaaaaaggttagtgaagactctgtctttcaaaacataaaaatctgcgataaaaccaattattccatacagtgactacggtcagttctgagaaatgacacccaggttggcgatgtgtctcatggttggccttccatggggacag

SEQ ID NO: 1349 - DNA, 251 bp, Artificial Sequence
  Synthetic
agctgagtctacacagtagcaaccaaatgttttagcagagaacgatgggtgtttcaccacaagactctttcccaatattttgtttctgtggcagaaaagcggatttttcttggcaagatgaacaggtttgcacatttatctgtctctaggaatttccataggctgcaagaagaaaaagaacatgagtgtcaagatacctagaaaaagatgttgaaggcttgcataaagcctactgaggctaaaactgttgt

SEQ ID NO: 1350 - DNA, 188 bp, Artificial Sequence
  Synthetic
gccaacaggtttccaggagatggtagacattgggacctgggggacctcagagcagagtgccacattacagggtgatcagacatgacctgtgctgttgtttgggaaacagggaagcattggggacccctcccaacttttcttcccagtaacgcctgctgtttactgccacctggcactggtgactacag

SEQ ID NO: 1351 - DNA, 248 bp, Artificial Sequence
  Synthetic
tgtccagtccgtaaccgcccacccgaccagctgcattggattggaggaaatcgagcttctgagtgcaggaggggcctctgcagaacactagcggttgccgcaggatctgtgaactttgcaatgtggctgcaagggtggtggtggtggtggtgatttggggtagttatttgttaactatggacacagtgaacgtagtttacgatcttgaaatgaaacttagatttttctggggaaatgttcagatacag

SEQ ID NO: 1352 - DNA, 248 bp, Artificial Sequence
  Synthetic
acctctccccactgcacattcagcctgccttccttcctttcagctgtgatccgaggtgtcaccaccaaagagttgtatccagagtttgggctggacatgaatgactgagcaggctcatcgccccttgtccacagctcccagggacagaagggtgtggacatgataaacactgagagcccaaccagcacacctacagagtttccagcgagacaatgccagaagcacttttctagagagcccaagcccaa

SEQ ID NO: 1353 - DNA, 163 bp, Artificial Sequence
  Synthetic
ggtctttggatctgcatatgtccctgaggtaagtattccagccatgggaaactgaagcacagagaggtagtcacccaccaaagctcagggctggcctccagagcttgaacccttgcctgagctggggtcaccagcctgggtgggccacggagcgatcatcatt

SEQ ID NO: 1354 - DNA, 189 bp, Artificial Sequence
  Synthetic
tggcaagacaaacagtagtggaaagaggtaaattattttacgtaccaatttttgatgatgaacttcatatcctgagtcatgtcggaattctgcatccatcttcacttcagagatctcctccgtcttgatatttgtcaacccagaacctgtattacatcataattaaagtatgcaggacaaccaattagt

SEQ ID NO: 1355 - DNA, 200 bp, Artificial Sequence
  Synthetic
gaggcagtgggggatggtctggggttgacagggagaaggactcatccactcatggatggctgagcagtgggatgcttttaatgaaatctgataaattgtaagagaaagctactgtgttacaccccctccactagggcaagggtaggcaggtagcacccccagttcctggaagcactgtcccctgtgacctcctggctttc

SEQ ID NO: 1356 - DNA, 200 bp, Artificial Sequence
  Synthetic
cccattcactgtctgcacctcacgaatctttttcttatggactgggctacaccagccccttttcttcccagcaacgtcctcataggcattctatgtatgtgacccgtgacaaagtgagagccaagggcttggatggaagcttgagcatagggcaagggatggcagctagagccaacagcctgcaactcttgtcaccccag

SEQ ID NO: 1357 - DNA, 151 bp, Artificial Sequence
  Synthetic
ttgtccaggccgtgcagcatctgccttgtgggtcacttctgtgctccagggaggactcaccatgggcatttgattggcagagcagctccgagtccgtccagagcttcctgcagtcaatgatcaccgctgtgggcatccctgaggtcatgtc

SEQ ID NO: 1358 - DNA, 153 bp, Artificial Sequence
  Synthetic
tccccatacttagggcccttgggagctcaccaaaccctcccaccccccttcagctggcagccaaggaggcgaagcttcgagacctggaggactcactggcccgtgagcgggacaccagccggcggctgctggcggaaaaggagcgggagatgg

SEQ ID NO: 1359 - DNA, 169 bp, Artificial Sequence
  Synthetic
caggccattcccaagaaacggggccgaaagccggggagtgtggtggcagccgctgccgccgaggccaaaaagaaagccgtgaaggagtcttctatccgatctgtgcaggagaccgtactccccatcaagaagcgcaagacccgggagacggtcagcatcgaggtcaagg

SEQ ID NO: 1360 - DNA, 150 bp, Artificial Sequence
  Synthetic
gcctttcgctctaaagtggagttgattgcgtacttcgaaaaggtaggcgacacatccctggaccctaatgattttgacttcacggtaactgggagagggagcccctcccggcgagagcagaaaccacctaagaagcccaaatctcccaaa

SEQ ID NO: 1361 - DNA, 159 bp, Artificial Sequence
  Synthetic
gggatatagggctgcctggaaggggctccaatccccctccctgctcacctgggctgagactctctctcgcccatagggggaccatgtgtggatggacctgagattggggcaggagttcgacgtgcccatcggggcggtggtgaagctctgcgactctgg

SEQ ID NO: 1362 - DNA, 182 bp, Artificial Sequence
  Synthetic
cctacgccgtagacaacacgtgtgtagtcaggagccgggacgtcagcactacaggcagcaccagcgaaggggccgtgacagccgttgccatctgctgccggagccggcacctggcgcaggcctcccaggagctccagtgacagccccatcccaggatgggtgtctggggagggtcaagggct

SEQ ID NO: 1363 - DNA, 150 bp, Artificial Sequence
  Synthetic
gacctgaccagtttcctgctcagtctcttctccctgtggttgtcatcgaagcctccctctaagcggctgacatttggatggcaccgagcaggtacggttcatagagtgagcaataacagcaggctggtgctgcaaagtcaaaccaagggt

SEQ ID NO: 1364 - DNA, 175 bp, Artificial Sequence
  Synthetic
tcccctgttgacctggagaagcatgaaccagtcaaaaagtttaaagacaagagcattaactgcaccagtgggcagctcagctcagacaccagtagcgtgggcacccagactgagcacgtgctggagcccaagaaatgcagagacctgtgcacctctggtcagggcaagtacagtg

SEQ ID NO: 1365 - DNA, 175 bp, Artificial Sequence
  Synthetic
ctgagatgtgggcagaaggggaaggagacttagtgagacttgaaacctatcatcagtcaaacattaaaagtggagtcagcctcgattacaccagtcctctcccttgggcttccctcacgtgcccggtctgtgtcctgatgcctgggactgtgaagttgctccctgtcaacaccaa

SEQ ID NO: 1366 - DNA, 175 bp, Artificial Sequence
  Synthetic
gtccaaaggcccaagaacctctgggcgtgggggcttcagtccagacatcagccaggggccccagccccctgtcctccatgggaggctgagcccctcacttgctcagtctgagctctttaccgctcactatgaactcctctgttccttttagtcttagcccttctgttccctctca

SEQ ID NO: 1367 - DNA, 175 bp, Artificial Sequence
  Synthetic
gctcatcttaatctgctcagccagaattttatattatacaccacagtttcttttagtttagttttttgtttgtttgtttgttgttaatacagacactctccctctcttgctcagtctggtctcgaactcctgggttgaagccatcctgccgcttcgaccttccaaagtgctagga

SEQ ID NO: 1368 - DNA, 303 bp, Artificial Sequence
  Synthetic
gtggggagatttgcatctgtggaggcaataaagtgaaataaataacagatgcaagcaagcttttcctgacgccccgcttgtccatgtctaggaaagattaacagagagtctgacaccttttaagatctgacagagaaacatttaccatagactatcacctattttttctgagggctgctacctgtacatctgcacaagattgcctttactccatgcctttcttcttctgctctaactctgacaatctgtcttgccatgccataagcccctattctttctgtaaccccaagatggtataaaagc

SEQ ID NO: 1369 - DNA, 185 bp, Artificial Sequence
  Synthetic
ttgaaatctcacctgggcgagaaaggtaacttatgtttcagtagcctctttctcaatgtgcttcaacccatcacggcctttgcaaatagagccctttattcatagtagacaagagtctaagcagaagaagaagagagccactacccaaccatctactcttctaatggtgttttcctacaaaggcc

SEQ ID NO: 1370 - DNA, 188 bp, Artificial Sequence
  Synthetic
gagaaggaggtgcaggagctagactccgaggggaggctgcgagccgcaagcgcaggagccgggtgggagagagaccccttcttctgcaaatgaggaggccgagcagaagaaagacggcgacagatgttggggggaggggacggtttgtgagggatagggagagaaagtctaagtgagagcaggacgag

SEQ ID NO: 1371 - DNA, 275 bp, Artificial Sequence
  Synthetic
gtagttctgacattcctcctgagggaaaataaataaattaattaaaaatatatatatatatgtataatgataaacatgctaacaaagtctgagcacaagaagaatggtgagaaggaatacattttatctaataaatatgtaagccattaataaaatgtaaaccattaaaacaacaaataaacctttcagatattgaccaaaaaataacaacagagctattaaacaatttgatttttatcaaataaatttaattgctgtatctgcaccttgtttga

SEQ ID NO: 1372 - DNA, 139 bp, Artificial Sequence
  Synthetic
tagtcgccttagcactgggtgcttaatccggctccatcttttctccacggagggggcctggtgctgcagacggggttcccggggtcaggacgatccaggtgacttgagagaaaataaggggagttgtattgacaccaac

SEQ ID NO: 1373 - DNA, 140 bp, Artificial Sequence
  Synthetic
cctctggcgaacatggcgcttgtcccctgccaggtgctgcggatggcaatcctgctgtcttactgctctatcctgtgtaactacaaggccatcgaaatgccctcacaccagacctacggagggagctggaaattcctgac

SEQ ID NO: 1374 - DNA, 161 bp, Artificial Sequence
  Synthetic
aggcagccaaggaatcctcattcctgtcctggaactacaggagtccctcctacagcaccaggtgtattcatcttctgttgttgctataacaaaattaccacaaacttagtggcttaagtaactacacatttattattttccagttgtggaggtcagaggtc

SEQ ID NO: 1375 - DNA, 156 bp, Artificial Sequence
  Synthetic
ctggaaggactcaggcaggagttaggaggctcccggggtcaggcttctgggtctagatttccagaggcccctctgcagcaccaggcattcgcctctaggagtcatcgctcttcagcggatcctgcagcccttggcgatgctcagagtgaacgcgtt

SEQ ID NO: 1376 - DNA, 21 bp, Artificial Sequence
  Synthetic
ccagactgagcacgtgagttt

SEQ ID NO: 1377 - DNA, 20 bp, Artificial Sequence
  Synthetic
cgactcggtgccactttttc

SEQ ID NO: 1378 - DNA, 189 bp, Artificial Sequence
  Synthetic
gagggactcctagaggactggttttagagctagaaatagcaagttaaaataaggctagtccgttatcaacttgaaaaagtggcaccgagtcggtgcatattgacacaattccccaatcctctaggagtcgtcagggtcaggagccccccccctgcacccaggaaaaccctcaaagtcggggggcaaccc

SEQ ID NO: 1379 - DNA, 129 bp, Artificial Sequence
  Synthetic
gagggactcctagaggactggttttagagctagaaatagcaagttaaaataaggctagtccgttatcaacttgaaaaagtggcaccgagtcggtgcatattgacacaattccccaatcctctaggagtc

SEQ ID NO: 1380 - DNA, 197 bp, Artificial Sequence
  Synthetic
gagggactcctagaggactggttttagagctagaaatagcaagttaaaataaggctagtccgttatcaacttgaaaaagtggcaccgagtcggtgcatattgacacaattccccaatcctctaggagtcaaaaacacgtcagggtcaggagccccccccctgcacccaggaaaaccctcaaagtcggggggcaaccc

SEQ ID NO: 1381 - DNA, 96 bp, Artificial Sequence
  Synthetic
gcagaaccgccactcattcagttttagagctagaaatagcaagttaaaataaggctagtccgttatcaacttgaaaaagtggcaccgagtcggtgc

SEQ ID NO: 1382 - DNA, 316 bp, Artificial Sequence
  Synthetic
gtgagagccaagggcttggagttttagagctagaaatagcaagttaaaataaggctagtccgttatcaacttgaaaaagtggcaccgagtcggtgccccttgccctatgctcatgcttccatctaagcccttggctcaaagttcccgcggttctatctagttacgcgttaaaccaactagaattttttaagcttgggccgctcgaggtacctctctacatatgacatgtgagcaaaaggccagcaaaaggccaggaaccgtaaaaaggccgcgttgctggcgtttttccataggctccgcccccctgacgagcatc

SEQ ID NO: 1383 - DNA, 315 bp, Artificial Sequence
  Synthetic
gtgagagccaagggcttggagttttagagctagaaatagcaagttaaaataaggctagtccgttatcaacttgaaaaagtggcaccgagtcggtgcccttgccctatgctcatgcttccatctaagcccttggctcaaagaaaccgcggttctatctagttacgcgttaaaccaactagaattttttaagcttgggccgctcgaggtacctctctacatatgacatgtgagcaaaaggccagcaaaaggccaggaaccgtaaaaaggccgcgttgctggcgtttttccataggctccgcccccctgacgagcatc

SEQ ID NO: 1384 - DNA, 314 bp, Artificial Sequence
  Synthetic
gtgagagccaagggcttggagttttagagctagaaatagcaagttaaaataaggctagtccgttatcaacttgaaaaagtggcaccgagtcggtgccttgccctatgctcatgcttccatctaagcccttggctcaaagtttccgcggttctatctagttacgcgttaaaccaactagaattttttaagcttgggccgctcgaggtacctctctacatatgacatgtgagcaaaaggccagcaaaaggccaggaaccgtaaaaaggccgcgttgctggcgtttttccataggctccgcccccctgacgagcatc

SEQ ID NO: 1385 - DNA, 313 bp, Artificial Sequence
  Synthetic
gtgagagccaagggcttggagttttagagctagaaatagcaagttaaaataaggctagtccgttatcaacttgaaaaagtggcaccgagtcggtgcttgccctatgctcatgcttccatctaagcccttggctcaaagtttccgcggttctatctagttacgcgttaaaccaactagaattttttaagcttgggccgctcgaggtacctctctacatatgacatgtgagcaaaaggccagcaaaaggccaggaaccgtaaaaaggccgcgttgctggcgtttttccataggctccgcccccctgacgagcatc

SEQ ID NO: 1386 - DNA, 312 bp, Artificial Sequence
  Synthetic
gtgagagccaagggcttggagttttagagctagaaatagcaagttaaaataaggctagtccgttatcaacttgaaaaagtggcaccgagtcggtgctgccctatgctcatgcttccatctaagcccttggctcaaagtttccgcggttctatctagttacgcgttaaaccaactagaattttttaagcttgggccgctcgaggtacctctctacatatgacatgtgagcaaaaggccagcaaaaggccaggaaccgtaaaaaggccgcgttgctggcgtttttccataggctccgcccccctgacgagcatc

SEQ ID NO: 1387 - DNA, 311 bp, Artificial Sequence
  Synthetic
gtgagagccaagggcttggagttttagagctagaaatagcaagttaaaataaggctagtccgttatcaacttgaaaaagtggcaccgagtcggtgcgccctatgctcatgcttccatctaagcccttggctcaaagtttccgcggttctatctagttacgcgttaaaccaactagaattttttaagcttgggccgctcgaggtacctctctacatatgacatgtgagcaaaaggccagcaaaaggccaggaaccgtaaaaaggccgcgttgctggcgtttttccataggctccgcccccctgacgagcatc

SEQ ID NO: 1388 - DNA, 310 bp, Artificial Sequence
  Synthetic
gtgagagccaagggcttggagttttagagctagaaatagcaagttaaaataaggctagtccgttatcaacttgaaaaagtggcaccgagtcggtgcccctatgctcatgcttccatctaagcccttggctcaaagtttccgcggttctatctagttacgcgttaaaccaactagaattttttaagcttgggccgctcgaggtacctctctacatatgacatgtgagcaaaaggccagcaaaaggccaggaaccgtaaaaaggccgcgttgctggcgtttttccataggctccgcccccctgacgagcatc

SEQ ID NO: 1389 - DNA, 309 bp, Artificial Sequence
  Synthetic
gtgagagccaagggcttggagttttagagctagaaatagcaagttaaaataaggctagtccgttatcaacttgaaaaagtggcaccgagtcggtgccctatgctcatgcttccatctaagcccttggctcaagtaaaccgcggttctatctagttacgcgttaaaccaactagaattttttaagcttgggccgctcgaggtacctctctacatatgacatgtgagcaaaaggccagcaaaaggccaggaaccgtaaaaaggccgcgttgctggcgtttttccataggctccgcccccctgacgagcatc

SEQ ID NO: 1390 - DNA, 308 bp, Artificial Sequence
  Synthetic
gtgagagccaagggcttggagttttagagctagaaatagcaagttaaaataaggctagtccgttatcaacttgaaaaagtggcaccgagtcggtgcctatgctcatgcttccatctaagcccttggctcaaagttcccgcggttctatctagttacgcgttaaaccaactagaattttttaagcttgggccgctcgaggtacctctctacatatgacatgtgagcaaaaggccagcaaaaggccaggaaccgtaaaaaggccgcgttgctggcgtttttccataggctccgcccccctgacgagcatc

SEQ ID NO: 1391 - DNA, 307 bp, Artificial Sequence
  Synthetic
gtgagagccaagggcttggagttttagagctagaaatagcaagttaaaataaggctagtccgttatcaacttgaaaaagtggcaccgagtcggtgctatgctcatgcttccatctaagcccttggctcaaagttcccgcggttctatctagttacgcgttaaaccaactagaattttttaagcttgggccgctcgaggtacctctctacatatgacatgtgagcaaaaggccagcaaaaggccaggaaccgtaaaaaggccgcgttgctggcgtttttccataggctccgcccccctgacgagcatc

SEQ ID NO: 1392 - DNA, 306 bp, Artificial Sequence
  Synthetic
gtgagagccaagggcttggagttttagagctagaaatagcaagttaaaataaggctagtccgttatcaacttgaaaaagtggcaccgagtcggtgcatgctcatgcttccatctaagcccttggctcaaagtttacgcggttctatctagttacgcgttaaaccaactagaattttttaagcttgggccgctcgaggtacctctctacatatgacatgtgagcaaaaggccagcaaaaggccaggaaccgtaaaaaggccgcgttgctggcgtttttccataggctccgcccccctgacgagcatc

SEQ ID NO: 1393 - DNA, 305 bp, Artificial Sequence
  Synthetic
gtgagagccaagggcttggagttttagagctagaaatagcaagttaaaataaggctagtccgttatcaacttgaaaaagtggcaccgagtcggtgctgctcatgcttccatctaagcccttggctcaaagttcccgcggttctatctagttacgcgttaaaccaactagaattttttaagcttgggccgctcgaggtacctctctacatatgacatgtgagcaaaaggccagcaaaaggccaggaaccgtaaaaaggccgcgttgctggcgtttttccataggctccgcccccctgacgagcatc

SEQ ID NO: 1394 - DNA, 316 bp, Artificial Sequence
  Synthetic
gtgagagccaagggcttggagttttagagctagaaatagcaagttaaaataaggctagtccgttatcaacttgaaaaagtggcaccgagtcggtgcttgccctatgctcatgcttccatctaagcccttggctctcaaataataacgcggttctatctagttacgcgttaaaccaactagaattttttaagcttgggccgctcgaggtacctctctacatatgacatgtgagcaaaaggccagcaaaaggccaggaaccgtaaaaaggccgcgttgctggcgtttttccataggctccgcccccctgacgagcatc

SEQ ID NO: 1395 - DNA, 315 bp, Artificial Sequence
  Synthetic
gtgagagccaagggcttggagttttagagctagaaatagcaagttaaaataaggctagtccgttatcaacttgaaaaagtggcaccgagtcggtgcttgccctatgctcatgcttccatctaagcccttggctctctaaataaacgcggttctatctagttacgcgttaaaccaactagaattttttaagcttgggccgctcgaggtacctctctacatatgacatgtgagcaaaaggccagcaaaaggccaggaaccgtaaaaaggccgcgttgctggcgtttttccataggctccgcccccctgacgagcatc

SEQ ID NO: 1396 - DNA, 314 bp, Artificial Sequence
  Synthetic
gtgagagccaagggcttggagttttagagctagaaatagcaagttaaaataaggctagtccgttatcaacttgaaaaagtggcaccgagtcggtgcttgccctatgctcatgcttccatctaagcccttggctctaaagttcgcgcggttctatctagttacgcgttaaaccaactagaattttttaagcttgggccgctcgaggtacctctctacatatgacatgtgagcaaaaggccagcaaaaggccaggaaccgtaaaaaggccgcgttgctggcgtttttccataggctccgcccccctgacgagcatc

SEQ ID NO: 1397 - DNA, 312 bp, Artificial Sequence
  Synthetic
gtgagagccaagggcttggagttttagagctagaaatagcaagttaaaataaggctagtccgttatcaacttgaaaaagtggcaccgagtcggtgcttgccctatgctcatgcttccatctaagcccttggctaaagaaatcgcggttctatctagttacgcgttaaaccaactagaattttttaagcttgggccgctcgaggtacctctctacatatgacatgtgagcaaaaggccagcaaaaggccaggaaccgtaaaaaggccgcgttgctggcgtttttccataggctccgcccccctgacgagcatc

SEQ ID NO: 1398 - DNA, 311 bp, Artificial Sequence
  Synthetic
gtgagagccaagggcttggagttttagagctagaaatagcaagttaaaataaggctagtccgttatcaacttgaaaaagtggcaccgagtcggtgcttgccctatgctcatgcttccatctaagcccttggcagaaattccgcggttctatctagttacgcgttaaaccaactagaattttttaagcttgggccgctcgaggtacctctctacatatgacatgtgagcaaaaggccagcaaaaggccaggaaccgtaaaaaggccgcgttgctggcgtttttccataggctccgcccccctgacgagcatc

SEQ ID NO: 1399 - DNA, 310 bp, Artificial Sequence
  Synthetic
gtgagagccaagggcttggagttttagagctagaaatagcaagttaaaataaggctagtccgttatcaacttgaaaaagtggcaccgagtcggtgcttgccctatgctcatgcttccatctaagcccttgggaaagaagcgcggttctatctagttacgcgttaaaccaactagaattttttaagcttgggccgctcgaggtacctctctacatatgacatgtgagcaaaaggccagcaaaaggccaggaaccgtaaaaaggccgcgttgctggcgtttttccataggctccgcccccctgacgagcatc

SEQ ID NO: 1400 - DNA, 309 bp, Artificial Sequence
  Synthetic
gtgagagccaagggcttggagttttagagctagaaatagcaagttaaaataaggctagtccgttatcaacttgaaaaagtggcaccgagtcggtgcttgccctatgctcatgcttccatctaagcccttgaaagatttcgcggttctatctagttacgcgttaaaccaactagaattttttaagcttgggccgctcgaggtacctctctacatatgacatgtgagcaaaaggccagcaaaaggccaggaaccgtaaaaaggccgcgttgctggcgtttttccataggctccgcccccctgacgagcatc

SEQ ID NO: 1401 - DNA, 308 bp, Artificial Sequence
  Synthetic
gtgagagccaagggcttggagttttagagctagaaatagcaagttaaaataaggctagtccgttatcaacttgaaaaagtggcaccgagtcggtgcttgccctatgctcatgcttccatctaagcccttaaagaaatcgcggttctatctagttacgcgttaaaccaactagaattttttaagcttgggccgctcgaggtacctctctacatatgacatgtgagcaaaaggccagcaaaaggccaggaaccgtaaaaaggccgcgttgctggcgtttttccataggctccgcccccctgacgagcatc

SEQ ID NO: 1402 - DNA, 314 bp, Artificial Sequence
  Synthetic
gaattgtctggacgtggagagttttagagctagaaatagcaagttaaaataaggctagtccgttatcaacttgaaaaagtggcaccgagtcggtgcttggtagcttctacagaatgccatcgccacgtccagacataaatagtcgcggttctatctagttacgcgttaaaccaactagaattttttaagcttgggccgctcgaggtacctctctacatatgacatgtgagcaaaaggccagcaaaaggccaggaaccgtaaaaaggccgcgttgctggcgtttttccataggctccgcccccctgacgagcatc

SEQ ID NO: 1403 - DNA, 313 bp, Artificial Sequence
  Synthetic
gaattgtctggacgtggagagttttagagctagaaatagcaagttaaaataaggctagtccgttatcaacttgaaaaagtggcaccgagtcggtgctggtagcttctacagaatgccatcgccacgtccagacacaaataaacgcggttctatctagttacgcgttaaaccaactagaattttttaagcttgggccgctcgaggtacctctctacatatgacatgtgagcaaaaggccagcaaaaggccaggaaccgtaaaaaggccgcgttgctggcgtttttccataggctccgcccccctgacgagcatc

SEQ ID NO: 1404 - DNA, 312 bp, Artificial Sequence
  Synthetic
gaattgtctggacgtggagagttttagagctagaaatagcaagttaaaataaggctagtccgttatcaacttgaaaaagtggcaccgagtcggtgcggtagcttctacagaatgccatcgccacgtccagacataaataagcgcggttctatctagttacgcgttaaaccaactagaattttttaagcttgggccgctcgaggtacctctctacatatgacatgtgagcaaaaggccagcaaaaggccaggaaccgtaaaaaggccgcgttgctggcgtttttccataggctccgcccccctgacgagcatc

SEQ ID NO: 1405 - DNA, 311 bp, Artificial Sequence
  Synthetic
gaattgtctggacgtggagagttttagagctagaaatagcaagttaaaataaggctagtccgttatcaacttgaaaaagtggcaccgagtcggtgcgtagcttctacagaatgccatcgccacgtccagacacaaaccatcgcggttctatctagttacgcgttaaaccaactagaattttttaagcttgggccgctcgaggtacctctctacatatgacatgtgagcaaaaggccagcaaaaggccaggaaccgtaaaaaggccgcgttgctggcgtttttccataggctccgcccccctgacgagcatc

SEQ ID NO: 1406 - DNA, 310 bp, Artificial Sequence
  Synthetic
gaattgtctggacgtggagagttttagagctagaaatagcaagttaaaataaggctagtccgttatcaacttgaaaaagtggcaccgagtcggtgctagcttctacagaatgccatcgccacgtccagacacaaaccagcgcggttctatctagttacgcgttaaaccaactagaattttttaagcttgggccgctcgaggtacctctctacatatgacatgtgagcaaaaggccagcaaaaggccaggaaccgtaaaaaggccgcgttgctggcgtttttccataggctccgcccccctgacgagcatc

SEQ ID NO: 1407 - DNA, 309 bp, Artificial Sequence
  Synthetic
gaattgtctggacgtggagagttttagagctagaaatagcaagttaaaataaggctagtccgttatcaacttgaaaaagtggcaccgagtcggtgcagcttctacagaatgccatcgccacgtccagacacaaataagcgcggttctatctagttacgcgttaaaccaactagaattttttaagcttgggccgctcgaggtacctctctacatatgacatgtgagcaaaaggccagcaaaaggccaggaaccgtaaaaaggccgcgttgctggcgtttttccataggctccgcccccctgacgagcatc

SEQ ID NO: 1408 - DNA, 308 bp, Artificial Sequence
  Synthetic
gaattgtctggacgtggagagttttagagctagaaatagcaagttaaaataaggctagtccgttatcaacttgaaaaagtggcaccgagtcggtgcgcttctacagaatgccatcgccacgtccagacacccaaatccgcggttctatctagttacgcgttaaaccaactagaattttttaagcttgggccgctcgaggtacctctctacatatgacatgtgagcaaaaggccagcaaaaggccaggaaccgtaaaaaggccgcgttgctggcgtttttccataggctccgcccccctgacgagcatc

SEQ ID NO: 1409 - DNA, 307 bp, Artificial Sequence
  Synthetic
gaattgtctggacgtggagagttttagagctagaaatagcaagttaaaataaggctagtccgttatcaacttgaaaaagtggcaccgagtcggtgccttctacagaatgccatcgccacgtccagacacaaacaaccgcggttctatctagttacgcgttaaaccaactagaattttttaagcttgggccgctcgaggtacctctctacatatgacatgtgagcaaaaggccagcaaaaggccaggaaccgtaaaaaggccgcgttgctggcgtttttccataggctccgcccccctgacgagcatc

SEQ ID NO: 1410 - DNA, 306 bp, Artificial Sequence
  Synthetic
gaattgtctggacgtggagagttttagagctagaaatagcaagttaaaataaggctagtccgttatcaacttgaaaaagtggcaccgagtcggtgcttctacagaatgccatcgccacgtccagacacaaacaagcgcggttctatctagttacgcgttaaaccaactagaattttttaagcttgggccgctcgaggtacctctctacatatgacatgtgagcaaaaggccagcaaaaggccaggaaccgtaaaaaggccgcgttgctggcgtttttccataggctccgcccccctgacgagcatc

SEQ ID NO: 1411 - DNA, 305 bp, Artificial Sequence
  Synthetic
gaattgtctggacgtggagagttttagagctagaaatagcaagttaaaataaggctagtccgttatcaacttgaaaaagtggcaccgagtcggtgctttacagagtgccatctccacgtccagacataaataagcgcggttctatctagttacgcgttaaaccaactagaattttttaagcttgggccgctcgaggtacctctctacatatgacatgtgagcaaaaggccagcaaaaggccaggaaccgtaaaaaggccgcgttgctggcgtttttccataggctccgcccccctgacgagcatc

SEQ ID NO: 1412 - DNA, 304 bp, Artificial Sequence
  Synthetic
gaattgtctggacgtggagagttttagagctagaaatagcaagttaaaataaggctagtccgttatcaacttgaaaaagtggcaccgagtcggtgcttacagagtgccatctccacgtccagacataaacccgcgcggttctatctagttacgcgttaaaccaactagaattttttaagcttgggccgctcgaggtacctctctacatatgacatgtgagcaaaaggccagcaaaaggccaggaaccgtaaaaaggccgcgttgctggcgtttttccataggctccgcccccctgacgagcatc

SEQ ID NO: 1413 - DNA, 303 bp, Artificial Sequence
  Synthetic
gaattgtctggacgtggagagttttagagctagaaatagcaagttaaaataaggctagtccgttatcaacttgaaaaagtggcaccgagtcggtgctacagagtgccatctccacgtccagacataagaatacgcggttctatctagttacgcgttaaaccaactagaattttttaagcttgggccgctcgaggtacctctctacatatgacatgtgagcaaaaggccagcaaaaggccaggaaccgtaaaaaggccgcgttgctggcgtttttccataggctccgcccccctgacgagcatc

SEQ ID NO: 1414 - DNA, 315 bp, Artificial Sequence
  Synthetic
gaattgtctggacgtggagagttttagagctagaaatagcaagttaaaataaggctagtccgttatcaacttgaaaaagtggcaccgagtcggtgcggtagcttctacagaatgccatcgccacgtccagacaattaaacaatacgcggttctatctagttacgcgttaaaccaactagaattttttaagcttgggccgctcgaggtacctctctacatatgacatgtgagcaaaaggccagcaaaaggccaggaaccgtaaaaaggccgcgttgctggcgtttttccataggctccgcccccctgacgagcatc

SEQ ID NO: 1415 - DNA, 314 bp, Artificial Sequence
  Synthetic
gaattgtctggacgtggagagttttagagctagaaatagcaagttaaaataaggctagtccgttatcaacttgaaaaagtggcaccgagtcggtgcggtagcttctacagaatgccatcgccacgtccagacaataaatacagcgcggttctatctagttacgcgttaaaccaactagaattttttaagcttgggccgctcgaggtacctctctacatatgacatgtgagcaaaaggccagcaaaaggccaggaaccgtaaaaaggccgcgttgctggcgtttttccataggctccgcccccctgacgagcatc

SEQ ID NO: 1416 - DNA, 313 bp, Artificial Sequence
  Synthetic
gaattgtctggacgtggagagttttagagctagaaatagcaagttaaaataaggctagtccgttatcaacttgaaaaagtggcaccgagtcggtgcggtagcttctacagaatgccatcgccacgtccagacaacaaacaaacgcggttctatctagttacgcgttaaaccaactagaattttttaagcttgggccgctcgaggtacctctctacatatgacatgtgagcaaaaggccagcaaaaggccaggaaccgtaaaaaggccgcgttgctggcgtttttccataggctccgcccccctgacgagcatc

SEQ ID NO: 1417 - DNA, 311 bp, Artificial Sequence
  Synthetic
gaattgtctggacgtggagagttttagagctagaaatagcaagttaaaataaggctagtccgttatcaacttgaaaaagtggcaccgagtcggtgcggtagcttctacagaatgccatcgccacgtccagacctaagaaacgcggttctatctagttacgcgttaaaccaactagaattttttaagcttgggccgctcgaggtacctctctacatatgacatgtgagcaaaaggccagcaaaaggccaggaaccgtaaaaaggccgcgttgctggcgtttttccataggctccgcccccctgacgagcatc

SEQ ID NO: 1418 - DNA, 310 bp, Artificial Sequence
  Synthetic
gaattgtctggacgtggagagttttagagctagaaatagcaagttaaaataaggctagtccgttatcaacttgaaaaagtggcaccgagtcggtgcggtagcttctacagaatgccatcgccacgtccagaagcctaaacgcggttctatctagttacgcgttaaaccaactagaattttttaagcttgggccgctcgaggtacctctctacatatgacatgtgagcaaaaggccagcaaaaggccaggaaccgtaaaaaggccgcgttgctggcgtttttccataggctccgcccccctgacgagcatc

SEQ ID NO: 1419 - DNA, 309 bp, Artificial Sequence
  Synthetic
gaattgtctggacgtggagagttttagagctagaaatagcaagttaaaataaggctagtccgttatcaacttgaaaaagtggcaccgagtcggtgcggtagcttctacagaatgccatcgccacgtccaggtgccactcgcggttctatctagttacgcgttaaaccaactagaattttttaagcttgggccgctcgaggtacctctctacatatgacatgtgagcaaaaggccagcaaaaggccaggaaccgtaaaaaggccgcgttgctggcgtttttccataggctccgcccccctgacgagcatc

SEQ ID NO: 1420 - DNA, 308 bp, Artificial Sequence
  Synthetic
gaattgtctggacgtggagagttttagagctagaaatagcaagttaaaataaggctagtccgttatcaacttgaaaaagtggcaccgagtcggtgcggtagcttctacagaatgccatcgccacgtccacctcctggcgcggttctatctagttacgcgttaaaccaactagaattttttaagcttgggccgctcgaggtacctctctacatatgacatgtgagcaaaaggccagcaaaaggccaggaaccgtaaaaaggccgcgttgctggcgtttttccataggctccgcccccctgacgagcatc

SEQ ID NO: 1421 - DNA, 303 bp, Artificial Sequence
  Synthetic
gaattgtctggacgtggagagttttagagctagaaatagcaagttaaaataaggctagtccgttatcaacttgaaaaagtggcaccgagtcggtgcggtagcttctacagaatgccatcgaacaccatcgcggttctatctagttacgcgttaaaccaactagaattttttcgaaaagcttgggccgctcgaggtacctctctacatatgacatgtgagcaaaaggccagcaaaaggccaggaaccgtaaaaaggccgcgttgctggcgtttttccataggctccgcccccctgacgagcatc

SEQ ID NO: 1422 - DNA, 308 bp, Artificial Sequence
  Synthetic
gtcggcatagctatattgcacgttttagagctagaaatagcaagttaaaataaggctagtccgttatcaacttgaaaaagtggcaccgagtcggtgcagaggactggggaatagtatcaatatagctataataaatccgcggttctatctagttacgcgttaaaccaactagaattttttaagcttgggccgctcgaggtacctctctacatatgacatgtgagcaaaaggccagcaaaaggccaggaaccgtaaaaaggccgcgttgctggcgtttttccataggctccgcccccctgacgagcatc

SEQ ID NO: 1423 - DNA, 307 bp, Artificial Sequence
  Synthetic
gtcggcatagctatattgcacgttttagagctagaaatagcaagttaaaataaggctagtccgttatcaacttgaaaaagtggcaccgagtcggtgcgaggactggggaatagtatcaatatagctataataatttcgcggttctatctagttacgcgttaaaccaactagaattttttaagcttgggccgctcgaggtacctctctacatatgacatgtgagcaaaaggccagcaaaaggccaggaaccgtaaaaaggccgcgttgctggcgtttttccataggctccgcccccctgacgagcatc

SEQ ID NO: 1424 - DNA, 306 bp, Artificial Sequence
  Synthetic
gtcggcatagctatattgcacgttttagagctagaaatagcaagttaaaataaggctagtccgttatcaacttgaaaaagtggcaccgagtcggtgcaggactggggaatagtatcaatatagctataaataaaccgcggttctatctagttacgcgttaaaccaactagaattttttaagcttgggccgctcgaggtacctctctacatatgacatgtgagcaaaaggccagcaaaaggccaggaaccgtaaaaaggccgcgttgctggcgtttttccataggctccgcccccctgacgagcatc

SEQ ID NO: 1425 - DNA, 305 bp, Artificial Sequence
  Synthetic
gtcggcatagctatattgcacgttttagagctagaaatagcaagttaaaataaggctagtccgttatcaacttgaaaaagtggcaccgagtcggtgcggactggggaatagtatcaatatagctataaataaaccgcggttctatctagttacgcgttaaaccaactagaattttttaagcttgggccgctcgaggtacctctctacatatgacatgtgagcaaaaggccagcaaaaggccaggaaccgtaaaaaggccgcgttgctggcgtttttccataggctccgcccccctgacgagcatc

SEQ ID NO: 1426 - DNA, 304 bp, Artificial Sequence
  Synthetic
gtcggcatagctatattgcacgttttagagctagaaatagcaagttaaaataaggctagtccgttatcaacttgaaaaagtggcaccgagtcggtgcgactggggaatagtatcaatatagctataaataaatcgcggttctatctagttacgcgttaaaccaactagaattttttaagcttgggccgctcgaggtacctctctacatatgacatgtgagcaaaaggccagcaaaaggccaggaaccgtaaaaaggccgcgttgctggcgtttttccataggctccgcccccctgacgagcatc

SEQ ID NO: 1427 - DNA, 303 bp, Artificial Sequence
  Synthetic
gtcggcatagctatattgcacgttttagagctagaaatagcaagttaaaataaggctagtccgttatcaacttgaaaaagtggcaccgagtcggtgcactggggaatagtatcaatatagctataataaattcgcggttctatctagttacgcgttaaaccaactagaattttttaagcttgggccgctcgaggtacctctctacatatgacatgtgagcaaaaggccagcaaaaggccaggaaccgtaaaaaggccgcgttgctggcgtttttccataggctccgcccccctgacgagcatc

SEQ ID NO: 1428 - DNA, 302 bp, Artificial Sequence
  Synthetic
gtcggcatagctatattgcacgttttagagctagaaatagcaagttaaaataaggctagtccgttatcaacttgaaaaagtggcaccgagtcggtgcctggggaatagtatcaatatagctataaataatacgcggttctatctagttacgcgttaaaccaactagaattttttaagcttgggccgctcgaggtacctctctacatatgacatgtgagcaaaaggccagcaaaaggccaggaaccgtaaaaaggccgcgttgctggcgtttttccataggctccgcccccctgacgagcatc

SEQ ID NO: 1429 - DNA, 301 bp, Artificial Sequence
  Synthetic
gtcggcatagctatattgcacgttttagagctagaaatagcaagttaaaataaggctagtccgttatcaacttgaaaaagtggcaccgagtcggtgctggggaatagtatcaatatagctataataaatacgcggttctatctagttacgcgttaaaccaactagaattttttaagcttgggccgctcgaggtacctctctacatatgacatgtgagcaaaaggccagcaaaaggccaggaaccgtaaaaaggccgcgttgctggcgtttttccataggctccgcccccctgacgagcatc

SEQ ID NO: 1430 - DNA, 300 bp, Artificial Sequence
  Synthetic
gtcggcatagctatattgcacgttttagagctagaaatagcaagttaaaataaggctagtccgttatcaacttgaaaaagtggcaccgagtcggtgcggggaatagtatcaatatagctataaataaaccgcggttctatctagttacgcgttaaaccaactagaattttttaagcttgggccgctcgaggtacctctctacatatgacatgtgagcaaaaggccagcaaaaggccaggaaccgtaaaaaggccgcgttgctggcgtttttccataggctccgcccccctgacgagcatc

SEQ ID NO: 1431 - DNA, 303 bp, Artificial Sequence
  Synthetic
gtcggcatagctatattgcacgttttagagctagaaatagcaagttaaaataaggctagtccgttatcaacttgaaaaagtggcaccgagtcggtgcgggaatagtatcaatatagctataaataaaccgcggttctatctagttacgcgttaaaccaactagaattttttcgaaaagcttgggccgctcgaggtacctctctacatatgacatgtgagcaaaaggccagcaaaaggccaggaaccgtaaaaaggccgcgttgctggcgtttttccataggctccgcccccctgacgagcatc

SEQ ID NO: 1432 - DNA, 302 bp, Artificial Sequence
  Synthetic
gtcggcatagctatattgcacgttttagagctagaaatagcaagttaaaataaggctagtccgttatcaacttgaaaaagtggcaccgagtcggtgcggaatagtatcaatatagctataaataatacgcggttctatctagttacgcgttaaaccaactagaattttttcgaaaagcttgggccgctcgaggtacctctctacatatgacatgtgagcaaaaggccagcaaaaggccaggaaccgtaaaaaggccgcgttgctggcgtttttccataggctccgcccccctgacgagcatc

SEQ ID NO: 1433 - DNA, 301 bp, Artificial Sequence
  Synthetic
gtcggcatagctatattgcacgttttagagctagaaatagcaagttaaaataaggctagtccgttatcaacttgaaaaagtggcaccgagtcggtgcgaatagtatcaatatagctataaataaaccgcggttctatctagttacgcgttaaaccaactagaattttttcgaaaagcttgggccgctcgaggtacctctctacatatgacatgtgagcaaaaggccagcaaaaggccaggaaccgtaaaaaggccgcgttgctggcgtttttccataggctccgcccccctgacgagcatc

SEQ ID NO: 1434 - DNA, 306 bp, Artificial Sequence
  Synthetic
gtcggcatagctatattgcacgttttagagctagaaatagcaagttaaaataaggctagtccgttatcaacttgaaaaagtggcaccgagtcggtgcactggggaatagtatcaatatagctatgccatttataacgcggttctatctagttacgcgttaaaccaactagaattttttaagcttgggccgctcgaggtacctctctacatatgacatgtgagcaaaaggccagcaaaaggccaggaaccgtaaaaaggccgcgttgctggcgtttttccataggctccgcccccctgacgagcatc

SEQ ID NO: 1435 - DNA, 305 bp, Artificial Sequence
  Synthetic
gtcggcatagctatattgcacgttttagagctagaaatagcaagttaaaataaggctagtccgttatcaacttgaaaaagtggcaccgagtcggtgcactggggaatagtatcaatatagctatgcataaatctcgcggttctatctagttacgcgttaaaccaactagaattttttaagcttgggccgctcgaggtacctctctacatatgacatgtgagcaaaaggccagcaaaaggccaggaaccgtaaaaaggccgcgttgctggcgtttttccataggctccgcccccctgacgagcatc

SEQ ID NO: 1436 - DNA, 304 bp, Artificial Sequence
  Synthetic
gtcggcatagctatattgcacgttttagagctagaaatagcaagttaaaataaggctagtccgttatcaacttgaaaaagtggcaccgagtcggtgcactggggaatagtatcaatatagctatgaataaatccgcggttctatctagttacgcgttaaaccaactagaattttttaagcttgggccgctcgaggtacctctctacatatgacatgtgagcaaaaggccagcaaaaggccaggaaccgtaaaaaggccgcgttgctggcgtttttccataggctccgcccccctgacgagcatc

SEQ ID NO: 1437 - DNA, 302 bp, Artificial Sequence
  Synthetic
gtcggcatagctatattgcacgttttagagctagaaatagcaagttaaaataaggctagtccgttatcaacttgaaaaagtggcaccgagtcggtgcactggggaatagtatcaatatagctaataaataacgcggttctatctagttacgcgttaaaccaactagaattttttaagcttgggccgctcgaggtacctctctacatatgacatgtgagcaaaaggccagcaaaaggccaggaaccgtaaaaaggccgcgttgctggcgtttttccataggctccgcccccctgacgagcatc

SEQ ID NO: 1438 - DNA, 301 bp, Artificial Sequence
  Synthetic
gtcggcatagctatattgcacgttttagagctagaaatagcaagttaaaataaggctagtccgttatcaacttgaaaaagtggcaccgagtcggtgcactggggaatagtatcaatatagctctagaacccgcggttctatctagttacgcgttaaaccaactagaattttttaagcttgggccgctcgaggtacctctctacatatgacatgtgagcaaaaggccagcaaaaggccaggaaccgtaaaaaggccgcgttgctggcgtttttccataggctccgcccccctgacgagcatc

SEQ ID NO: 1439 - DNA, 300 bp, Artificial Sequence
  Synthetic
gtcggcatagctatattgcacgttttagagctagaaatagcaagttaaaataaggctagtccgttatcaacttgaaaaagtggcaccgagtcggtgcactggggaatagtatcaatatagcaaataaatcgcggttctatctagttacgcgttaaaccaactagaattttttaagcttgggccgctcgaggtacctctctacatatgacatgtgagcaaaaggccagcaaaaggccaggaaccgtaaaaaggccgcgttgctggcgtttttccataggctccgcccccctgacgagcatc

SEQ ID NO: 1440 - DNA, 303 bp, Artificial Sequence
  Synthetic
gtcggcatagctatattgcacgttttagagctagaaatagcaagttaaaataaggctagtccgttatcaacttgaaaaagtggcaccgagtcggtgcactggggaatagtatcaatataggacttagccgcggttctatctagttacgcgttaaaccaactagaattttttcgaaaagcttgggccgctcgaggtacctctctacatatgacatgtgagcaaaaggccagcaaaaggccaggaaccgtaaaaaggccgcgttgctggcgtttttccataggctccgcccccctgacgagcatc

SEQ ID NO: 1441 - DNA, 309 bp, Artificial Sequence
  Synthetic
gagtcggcatagctatattggttttagagctagaaatagcaagttaaaataaggctagtccgttatcaacttgaaaaagtggcaccgagtcggtgcaggactggggaattgtgtctatatagctatgccgtgaaagaacgcggttctatctagttacgcgttaaaccaactagaattttttaagcttgggccgctcgaggtacctctctacatatgacatgtgagcaaaaggccagcaaaaggccaggaaccgtaaaaaggccgcgttgctggcgtttttccataggctccgcccccctgacgagcatc

SEQ ID NO: 1442 - DNA, 308 bp, Artificial Sequence
  Synthetic
gagtcggcatagctatattggttttagagctagaaatagcaagttaaaataaggctagtccgttatcaacttgaaaaagtggcaccgagtcggtgcggactggggaattgtgtctatatagctatgccgtgggaaaccgcggttctatctagttacgcgttaaaccaactagaattttttaagcttgggccgctcgaggtacctctctacatatgacatgtgagcaaaaggccagcaaaaggccaggaaccgtaaaaaggccgcgttgctggcgtttttccataggctccgcccccctgacgagcatc

SEQ ID NO: 1443 - DNA, 307 bp, Artificial Sequence
  Synthetic
gagtcggcatagctatattggttttagagctagaaatagcaagttaaaataaggctagtccgttatcaacttgaaaaagtggcaccgagtcggtgcgactggggaattgtgtctatatagctatgccgtggaaagacgcggttctatctagttacgcgttaaaccaactagaattttttaagcttgggccgctcgaggtacctctctacatatgacatgtgagcaaaaggccagcaaaaggccaggaaccgtaaaaaggccgcgttgctggcgtttttccataggctccgcccccctgacgagcatc

SEQ ID NO: 1444 - DNA, 306 bp, Artificial Sequence
  Synthetic
gagtcggcatagctatattggttttagagctagaaatagcaagttaaaataaggctagtccgttatcaacttgaaaaagtggcaccgagtcggtgcactggggaattgtgtctatatagctatgccgtgaaagaacgcggttctatctagttacgcgttaaaccaactagaattttttaagcttgggccgctcgaggtacctctctacatatgacatgtgagcaaaaggccagcaaaaggccaggaaccgtaaaaaggccgcgttgctggcgtttttccataggctccgcccccctgacgagcatc

SEQ ID NO: 1445 - DNA, 305 bp, Artificial Sequence
  Synthetic
gagtcggcatagctatattggttttagagctagaaatagcaagttaaaataaggctagtccgttatcaacttgaaaaagtggcaccgagtcggtgcctggggaattgtgtctatatagctatgccgtgaaagaacgcggttctatctagttacgcgttaaaccaactagaattttttaagcttgggccgctcgaggtacctctctacatatgacatgtgagcaaaaggccagcaaaaggccaggaaccgtaaaaaggccgcgttgctggcgtttttccataggctccgcccccctgacgagcatc

SEQ ID NO: 1446 - DNA, 304 bp, Artificial Sequence
  Synthetic
gagtcggcatagctatattggttttagagctagaaatagcaagttaaaataaggctagtccgttatcaacttgaaaaagtggcaccgagtcggtgctggggaattgtgtctatatagctatgccgtgaaagaacgcggttctatctagttacgcgttaaaccaactagaattttttaagcttgggccgctcgaggtacctctctacatatgacatgtgagcaaaaggccagcaaaaggccaggaaccgtaaaaaggccgcgttgctggcgtttttccataggctccgcccccctgacgagcatc

SEQ ID NO: 1447 - DNA, 303 bp, Artificial Sequence
  Synthetic
gagtcggcatagctatattggttttagagctagaaatagcaagttaaaataaggctagtccgttatcaacttgaaaaagtggcaccgagtcggtgcggggaattgtgtctatatagctatgccgtgaaagtacgcggttctatctagttacgcgttaaaccaactagaattttttaagcttgggccgctcgaggtacctctctacatatgacatgtgagcaaaaggccagcaaaaggccaggaaccgtaaaaaggccgcgttgctggcgtttttccataggctccgcccccctgacgagcatc

SEQ ID NO: 1448 - DNA, 302 bp, Artificial Sequence
  Synthetic
gagtcggcatagctatattggttttagagctagaaatagcaagttaaaataaggctagtccgttatcaacttgaaaaagtggcaccgagtcggtgcgggaattgtgtctatatagctatgccgtgaaagagcgcggttctatctagttacgcgttaaaccaactagaattttttaagcttgggccgctcgaggtacctctctacatatgacatgtgagcaaaaggccagcaaaaggccaggaaccgtaaaaaggccgcgttgctggcgtttttccataggctccgcccccctgacgagcatc

SEQ ID NO: 1449 - DNA, 301 bp, Artificial Sequence
  Synthetic
gagtcggcatagctatattggttttagagctagaaatagcaagttaaaataaggctagtccgttatcaacttgaaaaagtggcaccgagtcggtgcggaattgtgtctatatagctatgccgtggaaagacgcggttctatctagttacgcgttaaaccaactagaattttttaagcttgggccgctcgaggtacctctctacatatgacatgtgagcaaaaggccagcaaaaggccaggaaccgtaaaaaggccgcgttgctggcgtttttccataggctccgcccccctgacgagcatc

SEQ ID NO: 1450 - DNA, 300 bp, Artificial Sequence
  Synthetic
gagtcggcatagctatattggttttagagctagaaatagcaagttaaaataaggctagtccgttatcaacttgaaaaagtggcaccgagtcggtgcgaattgtgtctatatagctatgccgtggaaagacgcggttctatctagttacgcgttaaaccaactagaattttttaagcttgggccgctcgaggtacctctctacatatgacatgtgagcaaaaggccagcaaaaggccaggaaccgtaaaaaggccgcgttgctggcgtttttccataggctccgcccccctgacgagcatc

SEQ ID NO: 1451 - DNA, 303 bp, Artificial Sequence
  Synthetic
gagtcggcatagctatattggttttagagctagaaatagcaagttaaaataaggctagtccgttatcaacttgaaaaagtggcaccgagtcggtgcaattgtgtctatatagctatgccgtggaaagacgcggttctatctagttacgcgttaaaccaactagaattttttcgaaaagcttgggccgctcgaggtacctctctacatatgacatgtgagcaaaaggccagcaaaaggccaggaaccgtaaaaaggccgcgttgctggcgtttttccataggctccgcccccctgacgagcatc

SEQ ID NO: 1452 - DNA, 302 bp, Artificial Sequence
  Synthetic
gagtcggcatagctatattggttttagagctagaaatagcaagttaaaataaggctagtccgttatcaacttgaaaaagtggcaccgagtcggtgcattgtgtctatatagctatgccgtggaaagacgcggttctatctagttacgcgttaaaccaactagaattttttcgaaaagcttgggccgctcgaggtacctctctacatatgacatgtgagcaaaaggccagcaaaaggccaggaaccgtaaaaaggccgcgttgctggcgtttttccataggctccgcccccctgacgagcatc

SEQ ID NO: 1453 - DNA, 308 bp, Artificial Sequence
  Synthetic
gagtcggcatagctatattggttttagagctagaaatagcaagttaaaataaggctagtccgttatcaacttgaaaaagtggcaccgagtcggtgcctggggaattgtgtctatatagctatgccgactgaaagaaccgcggttctatctagttacgcgttaaaccaactagaattttttaagcttgggccgctcgaggtacctctctacatatgacatgtgagcaaaaggccagcaaaaggccaggaaccgtaaaaaggccgcgttgctggcgtttttccataggctccgcccccctgacgagcatc

SEQ ID NO: 1454 - DNA, 307 bp, Artificial Sequence
  Synthetic
gagtcggcatagctatattggttttagagctagaaatagcaagttaaaataaggctagtccgttatcaacttgaaaaagtggcaccgagtcggtgcctggggaattgtgtctatatagctatgccgacgaaagaagcgcggttctatctagttacgcgttaaaccaactagaattttttaagcttgggccgctcgaggtacctctctacatatgacatgtgagcaaaaggccagcaaaaggccaggaaccgtaaaaaggccgcgttgctggcgtttttccataggctccgcccccctgacgagcatc

SEQ ID NO: 1455 - DNA, 306 bp, Artificial Sequence
  Synthetic
gagtcggcatagctatattggttttagagctagaaatagcaagttaaaataaggctagtccgttatcaacttgaaaaagtggcaccgagtcggtgcctggggaattgtgtctatatagctatgccgaaataaattcgcggttctatctagttacgcgttaaaccaactagaattttttaagcttgggccgctcgaggtacctctctacatatgacatgtgagcaaaaggccagcaaaaggccaggaaccgtaaaaaggccgcgttgctggcgtttttccataggctccgcccccctgacgagcatc

SEQ ID NO: 1456 - DNA, 304 bp, Artificial Sequence
  Synthetic
gagtcggcatagctatattggttttagagctagaaatagcaagttaaaataaggctagtccgttatcaacttgaaaaagtggcaccgagtcggtgcctggggaattgtgtctatatagctatgccaaataaagcgcggttctatctagttacgcgttaaaccaactagaattttttaagcttgggccgctcgaggtacctctctacatatgacatgtgagcaaaaggccagcaaaaggccaggaaccgtaaaaaggccgcgttgctggcgtttttccataggctccgcccccctgacgagcatc

SEQ ID NO: 1457 - DNA, 303 bp, Artificial Sequence
  Synthetic
gagtcggcatagctatattggttttagagctagaaatagcaagttaaaataaggctagtccgttatcaacttgaaaaagtggcaccgagtcggtgcctggggaattgtgtctatatagctatgcataaaggacgcggttctatctagttacgcgttaaaccaactagaattttttaagcttgggccgctcgaggtacctctctacatatgacatgtgagcaaaaggccagcaaaaggccaggaaccgtaaaaaggccgcgttgctggcgtttttccataggctccgcccccctgacgagcatc

SEQ ID NO: 1458 - DNA, 302 bp, Artificial Sequence
  Synthetic
gagtcggcatagctatattggttttagagctagaaatagcaagttaaaataaggctagtccgttatcaacttgaaaaagtggcaccgagtcggtgcctggggaattgtgtctatatagctatgaaataaaccgcggttctatctagttacgcgttaaaccaactagaattttttaagcttgggccgctcgaggtacctctctacatatgacatgtgagcaaaaggccagcaaaaggccaggaaccgtaaaaaggccgcgttgctggcgtttttccataggctccgcccccctgacgagcatc

SEQ ID NO: 1459 - DNA, 310 bp, Artificial Sequence
  Synthetic
gagtcggcatagctatattggttttagagctagaaatagcaagttaaaataaggctagtccgttatcaacttgaaaaagtggcaccgagtcggtgcctggggaattgtgtctatatagctataattaaatcgcggttctatctagttacgcgttaaaccaactagaattttttcgaagatctaagcttgggccgctcgaggtacctctctacatatgacatgtgagcaaaaggccagcaaaaggccaggaaccgtaaaaaggccgcgttgctggcgtttttccataggctccgcccccctgacgagcatc

SEQ ID NO: 1460 - DNA, 184 bp, Artificial Sequence
  Synthetic
gatgtccacggactttccatagttttagagctagaaatagcaagttaaaataaggctagtccgttatcaacttgaaaaagtggcaccgagtcggtgcagagtacattgacaccagcaggtgtcgctccctagagcccttacttggcgctccctacggaaagtccgtggaccaacacactttttt

SEQ ID NO: 1461 - DNA, 226 bp, Artificial Sequence
  Synthetic
gatgtccacggactttccatagttttagagctagaaatagcaagttaaaataaggctagtccgttatcaacttgaaaaagtggcaccgagtcggtgcagagtacattgacaccagcaggtgtcgctccctagagcccttacttggcgctccctacggaaagtccgtggaccaacacacttgacgcggttctatctagttacgcgttaaaccaactagaaatttttt

SEQ ID NO: 1462 - DNA, 197 bp, Artificial Sequence
  Synthetic
gatgtccacggactttccatagttttagagctagaaatagcaagttaaaataaggctagtccgttatcaacttgaaaaagtggcaccgagtcggtgcagagtacattgacaccagcaggtgtcgctccctagagcccttacttggcgctccctacggaaagtccgtggaccaacacactggtggtggtggttttttt

SEQ ID NO: 1463 - DNA, 240 bp, Artificial Sequence
  Synthetic
gatgtccacggactttccatagttttagagctagaaatagcaagttaaaataaggctagtccgttatcaacttgaaaaagtggcaccgagtcggtgcagagtacattgacaccagcaggtgtcgctccctagagcccttacttggcgctccctacggaaagtccgtggaccaacacacgggtcaggagccccccccctgaacccaggataaccctcaaagtcggggggcaaccctttttt

SEQ ID NO: 1464 - DNA, 265 bp, Artificial Sequence
  Synthetic
gatgtccacggactttccatagttttagagctagaaatagcaagttaaaataaggctagtccgttatcaacttgaaaaagtggcaccgagtcggtgcagagtacattgacaccagcaggtgtcgctccctagagcccttacttggcgctccctacggaaagtccgtggaccaacacacggcggggctcgttggtctaggggtatgattctcgcttcgggtgcgagaggtcccgggttcaaatcccggacgagccccgcctttttt

SEQ ID NO: 1465 - DNA, 137 bp, Artificial Sequence
  Synthetic
gagggactcctagaggactggttttagagctagaaatagcaagttaaaataaggctagtccgttatcaacttgaaaaagtggcaccgagtcggtgcgctatattggcacaattccccaatcctctaggagttttttt

SEQ ID NO: 1466 - DNA, 135 bp, Artificial Sequence
  Synthetic
gagggactcctagaggactggttttagagctagaaatagcaagttaaaataaggctagtccgttatcaacttgaaaaagtggcaccgagtcggtgcatattggcacaattccccaatcctctaggagtctttttt

SEQ ID NO: 1467 - DNA, 134 bp, Artificial Sequence
  Synthetic
gagggactcctagaggactggttttagagctagaaatagcaagttaaaataaggctagtccgttatcaacttgaaaaagtggcaccgagtcggtgcatattggcacaattccccaatcctctaggagttttttt

SEQ ID NO: 1468 - DNA, 132 bp, Artificial Sequence
  Synthetic
gagggactcctagaggactggttttagagctagaaatagcaagttaaaataaggctagtccgttatcaacttgaaaaagtggcaccgagtcggtgcatattggcacaattccccaatcctctaggatttttt

SEQ ID NO: 1469 - DNA, 134 bp, Artificial Sequence
  Synthetic
gagggactcctagaggactggttttagagctagaaatagcaagttaaaataaggctagtccgttatcaacttgaaaaagtggcaccgagtcggtgctattggcacaattccccaatcctctaggagtctttttt

SEQ ID NO: 1470 - DNA, 140 bp, Artificial Sequence
  Synthetic
gagggactcctagaggactggttttagagctagaaatagcaagttaaaataaggctagtccgttatcaacttgaaaaagtggcaccgagtcggtgcgctatattggcacaattccccagtcctctaggagtagatttttt

SEQ ID NO: 1471 - DNA, 138 bp, Artificial Sequence
  Synthetic
gagggactcctagaggactggttttagagctagaaatagcaagttaaaataaggctagtccgttatcaacttgaaaaagtggcaccgagtcggtgcatattggcacaattccccagtcctctaggagtcagatttttt

SEQ ID NO: 1472 - DNA, 137 bp, Artificial Sequence
  Synthetic
gagggactcctagaggactggttttagagctagaaatagcaagttaaaataaggctagtccgttatcaacttgaaaaagtggcaccgagtcggtgcatattggcacaattccccagtcctctaggagtagatttttt

SEQ ID NO: 1473 - DNA, 135 bp, Artificial Sequence
  Synthetic
gagggactcctagaggactggttttagagctagaaatagcaagttaaaataaggctagtccgttatcaacttgaaaaagtggcaccgagtcggtgcatattggcacaattccccagtcctctaggaagatttttt

SEQ ID NO: 1474 - DNA, 137 bp, Artificial Sequence
  Synthetic
gagggactcctagaggactggttttagagctagaaatagcaagttaaaataaggctagtccgttatcaacttgaaaaagtggcaccgagtcggtgctattggcacaattccccagtcctctaggagtcagatttttt

SEQ ID NO: 1475 - DNA, 145 bp, Artificial Sequence
  Synthetic
gagggactcctagaggactggttttagagctagaaatagcaagttaaaataaggctagtccgttatcaacttgaaaaagtggcaccgagtcggtgcgctatattggcacaattccccagtcctctaggagtagacacactttttt

SEQ ID NO: 1476 - DNA, 143 bp, Artificial Sequence
  Synthetic
gagggactcctagaggactggttttagagctagaaatagcaagttaaaataaggctagtccgttatcaacttgaaaaagtggcaccgagtcggtgcatattggcacaattccccagtcctctaggagtcagacacactttttt

SEQ ID NO: 1477 - DNA, 142 bp, Artificial Sequence
  Synthetic
gagggactcctagaggactggttttagagctagaaatagcaagttaaaataaggctagtccgttatcaacttgaaaaagtggcaccgagtcggtgcatattggcacaattccccagtcctctaggagtagacacactttttt

SEQ ID NO: 1478 - DNA, 140 bp, Artificial Sequence
  Synthetic
gagggactcctagaggactggttttagagctagaaatagcaagttaaaataaggctagtccgttatcaacttgaaaaagtggcaccgagtcggtgcatattggcacaattccccagtcctctaggaagacacactttttt

SEQ ID NO: 1479 - DNA, 142 bp, Artificial Sequence
  Synthetic
gagggactcctagaggactggttttagagctagaaatagcaagttaaaataaggctagtccgttatcaacttgaaaaagtggcaccgagtcggtgctattggcacaattccccagtcctctaggagtcagacacactttttt

SEQ ID NO: 1480 - DNA, 153 bp, Artificial Sequence
  Synthetic
gagggactcctagaggactggttttagagctagaaatagcaagttaaaataaggctagtccgttatcaacttgaaaaagtggcaccgagtcggtgcgctatattggcacaattccccagtcctctaggagtagatggtggtggtggttttttt

SEQ ID NO: 1481 - DNA, 151 bp, Artificial Sequence
  Synthetic
gagggactcctagaggactggttttagagctagaaatagcaagttaaaataaggctagtccgttatcaacttgaaaaagtggcaccgagtcggtgcatattggcacaattccccagtcctctaggagtcagatggtggtggtggttttttt

SEQ ID NO: 1482 - DNA, 150 bp, Artificial Sequence
  Synthetic
gagggactcctagaggactggttttagagctagaaatagcaagttaaaataaggctagtccgttatcaacttgaaaaagtggcaccgagtcggtgcatattggcacaattccccagtcctctaggagtagatggtggtggtggttttttt

SEQ ID NO: 1483 - DNA, 148 bp, Artificial Sequence
  Synthetic
gagggactcctagaggactggttttagagctagaaatagcaagttaaaataaggctagtccgttatcaacttgaaaaagtggcaccgagtcggtgcatattggcacaattccccagtcctctaggaagatggtggtggtggttttttt

SEQ ID NO: 1484 - DNA, 150 bp, Artificial Sequence
  Synthetic
gagggactcctagaggactggttttagagctagaaatagcaagttaaaataaggctagtccgttatcaacttgaaaaagtggcaccgagtcggtgctattggcacaattccccagtcctctaggagtcagatggtggtggtggttttttt

SEQ ID NO: 1485 - DNA, 158 bp, Artificial Sequence
  Synthetic
gagggactcctagaggactggttttagagctagaaatagcaagttaaaataaggctagtccgttatcaacttgaaaaagtggcaccgagtcggtgcgctatattggcacaattccccagtcctctaggagtagacacactggtggtggtggttttttt

SEQ ID NO: 1486 - DNA, 156 bp, Artificial Sequence
  Synthetic
gagggactcctagaggactggttttagagctagaaatagcaagttaaaataaggctagtccgttatcaacttgaaaaagtggcaccgagtcggtgcatattggcacaattccccagtcctctaggagtcagacacactggtggtggtggttttttt

SEQ ID NO: 1487 - DNA, 155 bp, Artificial Sequence
  Synthetic
gagggactcctagaggactggttttagagctagaaatagcaagttaaaataaggctagtccgttatcaacttgaaaaagtggcaccgagtcggtgcatattggcacaattccccagtcctctaggagtagacacactggtggtggtggttttttt

SEQ ID NO: 1488 - DNA, 153 bp, Artificial Sequence
  Synthetic
gagggactcctagaggactggttttagagctagaaatagcaagttaaaataaggctagtccgttatcaacttgaaaaagtggcaccgagtcggtgcatattggcacaattccccagtcctctaggaagacacactggtggtggtggttttttt

SEQ ID NO: 1489 - DNA, 155 bp, Artificial Sequence
  Synthetic
gagggactcctagaggactggttttagagctagaaatagcaagttaaaataaggctagtccgttatcaacttgaaaaagtggcaccgagtcggtgctattggcacaattccccagtcctctaggagtcagacacactggtggtggtggttttttt

SEQ ID NO: 1490 - DNA, 182 bp, Artificial Sequence
  Synthetic
gagggactcctagaggactggttttagagctagaaatagcaagttaaaataaggctagtccgttatcaacttgaaaaagtggcaccgagtcggtgcgctatattggcacaattccccagtcctctaggagtagattgacgcggttctatctagttacgcgttaaaccaactagaaatttttt

SEQ ID NO: 1491 - DNA, 180 bp, Artificial Sequence
  Synthetic
gagggactcctagaggactggttttagagctagaaatagcaagttaaaataaggctagtccgttatcaacttgaaaaagtggcaccgagtcggtgcatattggcacaattccccagtcctctaggagtcagattgacgcggttctatctagttacgcgttaaaccaactagaaatttttt

SEQ ID NO: 1492 - DNA, 179 bp, Artificial Sequence
  Synthetic
gagggactcctagaggactggttttagagctagaaatagcaagttaaaataaggctagtccgttatcaacttgaaaaagtggcaccgagtcggtgcatattggcacaattccccagtcctctaggagtagattgacgcggttctatctagttacgcgttaaaccaactagaaatttttt

SEQ ID NO: 1493 - DNA, 177 bp, Artificial Sequence
  Synthetic
gagggactcctagaggactggttttagagctagaaatagcaagttaaaataaggctagtccgttatcaacttgaaaaagtggcaccgagtcggtgcatattggcacaattccccagtcctctaggaagattgacgcggttctatctagttacgcgttaaaccaactagaaatttttt

SEQ ID NO: 1494 - DNA, 179 bp, Artificial Sequence
  Synthetic
gagggactcctagaggactggttttagagctagaaatagcaagttaaaataaggctagtccgttatcaacttgaaaaagtggcaccgagtcggtgctattggcacaattccccagtcctctaggagtcagattgacgcggttctatctagttacgcgttaaaccaactagaaatttttt

SEQ ID NO: 1495 - DNA, 187 bp, Artificial Sequence
  Synthetic
gagggactcctagaggactggttttagagctagaaatagcaagttaaaataaggctagtccgttatcaacttgaaaaagtggcaccgagtcggtgcgctatattggcacaattccccagtcctctaggagtagacacacttgacgcggttctatctagttacgcgttaaaccaactagaaatttttt

SEQ ID NO: 1496 - DNA, 185 bp, Artificial Sequence
  Synthetic
gagggactcctagaggactggttttagagctagaaatagcaagttaaaataaggctagtccgttatcaacttgaaaaagtggcaccgagtcggtgcatattggcacaattccccagtcctctaggagtcagacacacttgacgcggttctatctagttacgcgttaaaccaactagaaatttttt

SEQ ID NO: 1497 - DNA, 184 bp, Artificial Sequence
  Synthetic
gagggactcctagaggactggttttagagctagaaatagcaagttaaaataaggctagtccgttatcaacttgaaaaagtggcaccgagtcggtgcatattggcacaattccccagtcctctaggagtagacacacttgacgcggttctatctagttacgcgttaaaccaactagaaatttttt

SEQ ID NO: 1498 - DNA, 182 bp, Artificial Sequence
  Synthetic
gagggactcctagaggactggttttagagctagaaatagcaagttaaaataaggctagtccgttatcaacttgaaaaagtggcaccgagtcggtgcatattggcacaattccccagtcctctaggaagacacacttgacgcggttctatctagttacgcgttaaaccaactagaaatttttt

SEQ ID NO: 1499 - DNA, 184 bp, Artificial Sequence
  Synthetic
gagggactcctagaggactggttttagagctagaaatagcaagttaaaataaggctagtccgttatcaacttgaaaaagtggcaccgagtcggtgctattggcacaattccccagtcctctaggagtcagacacacttgacgcggttctatctagttacgcgttaaaccaactagaaatttttt

SEQ ID NO: 1500 - DNA, 196 bp, Artificial Sequence
  Synthetic
gagggactcctagaggactggttttagagctagaaatagcaagttaaaataaggctagtccgttatcaacttgaaaaagtggcaccgagtcggtgcgctatattggcacaattccccagtcctctaggagtagagggtcaggagccccccccctgaacccaggataaccctcaaagtcggggggcaaccctttttt

SEQ ID NO: 1501 - DNA, 194 bp, Artificial Sequence
  Synthetic
gagggactcctagaggactggttttagagctagaaatagcaagttaaaataaggctagtccgttatcaacttgaaaaagtggcaccgagtcggtgcatattggcacaattccccagtcctctaggagtcagagggtcaggagccccccccctgaacccaggataaccctcaaagtcggggggcaaccctttttt

SEQ ID NO: 1502 - DNA, 193 bp, Artificial Sequence
  Synthetic
gagggactcctagaggactggttttagagctagaaatagcaagttaaaataaggctagtccgttatcaacttgaaaaagtggcaccgagtcggtgcatattggcacaattccccagtcctctaggagtagagggtcaggagccccccccctgaacccaggataaccctcaaagtcggggggcaaccctttttt

SEQ ID NO: 1503 - DNA, 191 bp, Artificial Sequence
  Synthetic
gagggactcctagaggactggttttagagctagaaatagcaagttaaaataaggctagtccgttatcaacttgaaaaagtggcaccgagtcggtgcatattggcacaattccccagtcctctaggaagagggtcaggagccccccccctgaacccaggataaccctcaaagtcggggggcaaccctttttt

SEQ ID NO: 1504 - DNA, 193 bp, Artificial Sequence
  Synthetic
gagggactcctagaggactggttttagagctagaaatagcaagttaaaataaggctagtccgttatcaacttgaaaaagtggcaccgagtcggtgctattggcacaattccccagtcctctaggagtcagagggtcaggagccccccccctgaacccaggataaccctcaaagtcggggggcaaccctttttt

SEQ ID NO: 1505 - DNA, 201 bp, Artificial Sequence
  Synthetic
gagggactcctagaggactggttttagagctagaaatagcaagttaaaataaggctagtccgttatcaacttgaaaaagtggcaccgagtcggtgcgctatattggcacaattccccagtcctctaggagtagacacacgggtcaggagccccccccctgaacccaggataaccctcaaagtcggggggcaaccctttttt

SEQ ID NO: 1506 - DNA, 199 bp, Artificial Sequence
  Synthetic
gagggactcctagaggactggttttagagctagaaatagcaagttaaaataaggctagtccgttatcaacttgaaaaagtggcaccgagtcggtgcatattggcacaattccccagtcctctaggagtcagacacacgggtcaggagccccccccctgaacccaggataaccctcaaagtcggggggcaaccctttttt

SEQ ID NO: 1507 - DNA, 198 bp, Artificial Sequence
  Synthetic
gagggactcctagaggactggttttagagctagaaatagcaagttaaaataaggctagtccgttatcaacttgaaaaagtggcaccgagtcggtgcatattggcacaattccccagtcctctaggagtagacacacgggtcaggagccccccccctgaacccaggataaccctcaaagtcggggggcaaccctttttt

SEQ ID NO: 1508 - DNA, 196 bp, Artificial Sequence
  Synthetic
gagggactcctagaggactggttttagagctagaaatagcaagttaaaataaggctagtccgttatcaacttgaaaaagtggcaccgagtcggtgcatattggcacaattccccagtcctctaggaagacacacgggtcaggagccccccccctgaacccaggataaccctcaaagtcggggggcaaccctttttt

SEQ ID NO: 1509 - DNA, 198 bp, Artificial Sequence
  Synthetic
gagggactcctagaggactggttttagagctagaaatagcaagttaaaataaggctagtccgttatcaacttgaaaaagtggcaccgagtcggtgctattggcacaattccccagtcctctaggagtcagacacacgggtcaggagccccccccctgaacccaggataaccctcaaagtcggggggcaaccctttttt

SEQ ID NO: 1510 - DNA, 174 bp, Artificial Sequence
  Synthetic
gagggactcctagaggactggttttagagctagaaatagcaagttaaaataaggctagtccgttatcaacttgaaaaagtggcaccgagtcggtgcgctatattggcacaattccccagtcctctaggagtagagcgatgccgtatgccgaaaggcatacggcatcgctttttt

SEQ ID NO: 1511 - DNA, 172 bp, Artificial Sequence
  Synthetic
gagggactcctagaggactggttttagagctagaaatagcaagttaaaataaggctagtccgttatcaacttgaaaaagtggcaccgagtcggtgcatattggcacaattccccagtcctctaggagtcagagcgatgccgtatgccgaaaggcatacggcatcgctttttt

SEQ ID NO: 1512 - DNA, 171 bp, Artificial Sequence
  Synthetic
gagggactcctagaggactggttttagagctagaaatagcaagttaaaataaggctagtccgttatcaacttgaaaaagtggcaccgagtcggtgcatattggcacaattccccagtcctctaggagtagagcgatgccgtatgccgaaaggcatacggcatcgctttttt

SEQ ID NO: 1513 - DNA, 169 bp, Artificial Sequence
  Synthetic
gagggactcctagaggactggttttagagctagaaatagcaagttaaaataaggctagtccgttatcaacttgaaaaagtggcaccgagtcggtgcatattggcacaattccccagtcctctaggaagagcgatgccgtatgccgaaaggcatacggcatcgctttttt

SEQ ID NO: 1514 - DNA, 171 bp, Artificial Sequence
  Synthetic
gagggactcctagaggactggttttagagctagaaatagcaagttaaaataaggctagtccgttatcaacttgaaaaagtggcaccgagtcggtgctattggcacaattccccagtcctctaggagtcagagcgatgccgtatgccgaaaggcatacggcatcgctttttt

SEQ ID NO: 1515 - DNA, 179 bp, Artificial Sequence
  Synthetic
gagggactcctagaggactggttttagagctagaaatagcaagttaaaataaggctagtccgttatcaacttgaaaaagtggcaccgagtcggtgcgctatattggcacaattccccagtcctctaggagtagacacacgcgatgccgtatgccgaaaggcatacggcatcgctttttt

SEQ ID NO: 1516 - DNA, 177 bp, Artificial Sequence
  Synthetic
gagggactcctagaggactggttttagagctagaaatagcaagttaaaataaggctagtccgttatcaacttgaaaaagtggcaccgagtcggtgcatattggcacaattccccagtcctctaggagtcagacacacgcgatgccgtatgccgaaaggcatacggcatcgctttttt

SEQ ID NO: 1517 - DNA, 176 bp, Artificial Sequence
  Synthetic
gagggactcctagaggactggttttagagctagaaatagcaagttaaaataaggctagtccgttatcaacttgaaaaagtggcaccgagtcggtgcatattggcacaattccccagtcctctaggagtagacacacgcgatgccgtatgccgaaaggcatacggcatcgctttttt

SEQ ID NO: 1518 - DNA, 174 bp, Artificial Sequence
  Synthetic
gagggactcctagaggactggttttagagctagaaatagcaagttaaaataaggctagtccgttatcaacttgaaaaagtggcaccgagtcggtgcatattggcacaattccccagtcctctaggaagacacacgcgatgccgtatgccgaaaggcatacggcatcgctttttt

SEQ ID NO: 1519 - DNA, 176 bp, Artificial Sequence
  Synthetic
gagggactcctagaggactggttttagagctagaaatagcaagttaaaataaggctagtccgttatcaacttgaaaaagtggcaccgagtcggtgctattggcacaattccccagtcctctaggagtcagacacacgcgatgccgtatgccgaaaggcatacggcatcgctttttt

SEQ ID NO: 1520 - DNA, 149 bp, Artificial Sequence
  Synthetic
gagggactcctagaggactggttttagagctaccagcggaaacgctggtagcaagttaaaataaggctagtccgttatcaacttgaaaaagtggcaccgagtcggtgcgctatattggcacaattccccagtcctctaggagttttttt

SEQ ID NO: 1521 - DNA, 147 bp, Artificial Sequence
  Synthetic
gagggactcctagaggactggttttagagctaccagcggaaacgctggtagcaagttaaaataaggctagtccgttatcaacttgaaaaagtggcaccgagtcggtgcatattggcacaattccccagtcctctaggagtctttttt

SEQ ID NO: 1522 - DNA, 146 bp, Artificial Sequence
  Synthetic
gagggactcctagaggactggttttagagctaccagcggaaacgctggtagcaagttaaaataaggctagtccgttatcaacttgaaaaagtggcaccgagtcggtgcatattggcacaattccccagtcctctaggagttttttt

SEQ ID NO: 1523 - DNA, 144 bp, Artificial Sequence
  Synthetic
gagggactcctagaggactggttttagagctaccagcggaaacgctggtagcaagttaaaataaggctagtccgttatcaacttgaaaaagtggcaccgagtcggtgcatattggcacaattccccagtcctctaggatttttt

SEQ ID NO: 1524 - DNA, 146 bp, Artificial Sequence
  Synthetic
gagggactcctagaggactggttttagagctaccagcggaaacgctggtagcaagttaaaataaggctagtccgttatcaacttgaaaaagtggcaccgagtcggtgctattggcacaattccccagtcctctaggagtctttttt

SEQ ID NO: 1525 - DNA, 145 bp, Artificial Sequence
  Synthetic
gagggactcctagaggactggttttagagctagaaatagcaagttaaaataaggctagtccgttatcaacttgaaaaagtggcaccgagtcggtgcgctatattggcacaattccccaatcctctaggagtaaaaacactttttt

SEQ ID NO: 1526 - DNA, 143 bp, Artificial Sequence
  Synthetic
gagggactcctagaggactggttttagagctagaaatagcaagttaaaataaggctagtccgttatcaacttgaaaaagtggcaccgagtcggtgcatattggcacaattccccaatcctctaggagtcaaaaacactttttt

SEQ ID NO: 1527 - DNA, 142 bp, Artificial Sequence
  Synthetic
gagggactcctagaggactggttttagagctagaaatagcaagttaaaataaggctagtccgttatcaacttgaaaaagtggcaccgagtcggtgcatattggcacaattccccaatcctctaggagtaaaaacactttttt

SEQ ID NO: 1528 - DNA, 201 bp, Artificial Sequence
  Synthetic
gagggactcctagaggactggttttagagctagaaatagcaagttaaaataaggctagtccgttatcaacttgaaaaagtggcaccgagtcggtgcgctatattggcacaattccccaatcctctaggagtaaaaacacgggtcaggagccccccccctgaacccaggataaccctcaaagtcggggggcaaccctttttt

SEQ ID NO: 1529 - DNA, 199 bp, Artificial Sequence
  Synthetic
gagggactcctagaggactggttttagagctagaaatagcaagttaaaataaggctagtccgttatcaacttgaaaaagtggcaccgagtcggtgcatattggcacaattccccaatcctctaggagtcaaaaacacgggtcaggagccccccccctgaacccaggataaccctcaaagtcggggggcaaccctttttt

SEQ ID NO: 1530 - DNA, 198 bp, Artificial Sequence
  Synthetic
gagggactcctagaggactggttttagagctagaaatagcaagttaaaataaggctagtccgttatcaacttgaaaaagtggcaccgagtcggtgcatattggcacaattccccaatcctctaggagtaaaaacacgggtcaggagccccccccctgaacccaggataaccctcaaagtcggggggcaaccctttttt

SEQ ID NO: 1531 - DNA, 187 bp, Artificial Sequence
  Synthetic
gagggactcctagaggactggttttagagctagaaatagcaagttaaaataaggctagtccgttatcaacttgaaaaagtggcaccgagtcggtgcgctatattggcacaattccccaatcctctaggagtaaaaacacttgacgcggttctatctagttacgcgttaaaccaactagaaatttttt

SEQ ID NO: 1532 - DNA, 185 bp, Artificial Sequence
  Synthetic
gagggactcctagaggactggttttagagctagaaatagcaagttaaaataaggctagtccgttatcaacttgaaaaagtggcaccgagtcggtgcatattggcacaattccccaatcctctaggagtcaaaaacacttgacgcggttctatctagttacgcgttaaaccaactagaaatttttt

SEQ ID NO: 1533 - DNA, 184 bp, Artificial Sequence
  Synthetic
gagggactcctagaggactggttttagagctagaaatagcaagttaaaataaggctagtccgttatcaacttgaaaaagtggcaccgagtcggtgcatattggcacaattccccaatcctctaggagtaaaaacacttgacgcggttctatctagttacgcgttaaaccaactagaaatttttt

SEQ ID NO: 1534 - DNA, 187 bp, Artificial Sequence
  Synthetic
gagggactcctagaggactggttttagagctagaaatagcaagttaaaataaggctagtccgttatcaacttgaaaaagtggcaccgagtcggtgcgctatattggcacaattccccaatcctctaggagtaaaaacacttgacgcggttctatctacttacgcgttaaaccaactagaaatttttt

SEQ ID NO: 1535 - DNA, 185 bp, Artificial Sequence
  Synthetic
gagggactcctagaggactggttttagagctagaaatagcaagttaaaataaggctagtccgttatcaacttgaaaaagtggcaccgagtcggtgcatattggcacaattccccaatcctctaggagtcaaaaacacttgacgcggttctatctacttacgcgttaaaccaactagaaatttttt

SEQ ID NO: 1536 - DNA, 184 bp, Artificial Sequence
  Synthetic
gagggactcctagaggactggttttagagctagaaatagcaagttaaaataaggctagtccgttatcaacttgaaaaagtggcaccgagtcggtgcatattggcacaattccccaatcctctaggagtaaaaacacttgacgcggttctatctacttacgcgttaaaccaactagaaatttttt

SEQ ID NO: 1537 - DNA, 187 bp, Artificial Sequence
  Synthetic
gagggactcctagaggactggttttagagctagaaatagcaagttaaaataaggctagtccgttatcaacttgaaaaagtggcaccgagtcggtgcgctatattggcacaattccccaatcctctaggagtaaaaacacttgacgcgcttctatctagttacgcgttaaaccaactagaaatttttt

SEQ ID NO: 1538 - DNA, 185 bp, Artificial Sequence
  Synthetic
gagggactcctagaggactggttttagagctagaaatagcaagttaaaataaggctagtccgttatcaacttgaaaaagtggcaccgagtcggtgcatattggcacaattccccaatcctctaggagtcaaaaacacttgacgcgcttctatctagttacgcgttaaaccaactagaaatttttt

SEQ ID NO: 1539 - DNA, 184 bp, Artificial Sequence
  Synthetic
gagggactcctagaggactggttttagagctagaaatagcaagttaaaataaggctagtccgttatcaacttgaaaaagtggcaccgagtcggtgcatattggcacaattccccaatcctctaggagtaaaaacacttgacgcgcttctatctagttacgcgttaaaccaactagaaatttttt

SEQ ID NO: 1540 - DNA, 182 bp, Artificial Sequence
  Synthetic
gagggactcctagaggactggttttagagctagaaatagcaagttaaaataaggctagtccgttatcaacttgaaaaagtggcaccgagtcggtgcgctatattggcacaattccccaatcctctaggagtaaaaacaccgcggttctatctagttacgcgttaaaccaactagaatttttt

SEQ ID NO: 1541 - DNA, 180 bp, Artificial Sequence
  Synthetic
gagggactcctagaggactggttttagagctagaaatagcaagttaaaataaggctagtccgttatcaacttgaaaaagtggcaccgagtcggtgcatattggcacaattccccaatcctctaggagtcaaaaacaccgcggttctatctagttacgcgttaaaccaactagaatttttt

SEQ ID NO: 1542 - DNA, 179 bp, Artificial Sequence
  Synthetic
gagggactcctagaggactggttttagagctagaaatagcaagttaaaataaggctagtccgttatcaacttgaaaaagtggcaccgagtcggtgcatattggcacaattccccaatcctctaggagtaaaaacaccgcggttctatctagttacgcgttaaaccaactagaatttttt

SEQ ID NO: 1543 - DNA, 189 bp, Artificial Sequence
  Synthetic
gagggactcctagaggactggttttagagctagaaatagcaagttaaaataaggctagtccgttatcaacttgaaaaagtggcaccgagtcggtgcgctatattggcacaattccccaatcctctaggagtaaaaacaccgcgagtctaggggataacgcgttaaacttcctagaaggcggtttttttt

SEQ ID NO: 1544 - DNA, 187 bp, Artificial Sequence
  Synthetic
gagggactcctagaggactggttttagagctagaaatagcaagttaaaataaggctagtccgttatcaacttgaaaaagtggcaccgagtcggtgcatattggcacaattccccaatcctctaggagtcaaaaacaccgcgagtctaggggataacgcgttaaacttcctagaaggcggtttttttt

SEQ ID NO: 1545 - DNA, 186 bp, Artificial Sequence
  Synthetic
gagggactcctagaggactggttttagagctagaaatagcaagttaaaataaggctagtccgttatcaacttgaaaaagtggcaccgagtcggtgcatattggcacaattccccaatcctctaggagtaaaaacaccgcgagtctaggggataacgcgttaaacttcctagaaggcggtttttttt

SEQ ID NO: 1546 - DNA, 189 bp, Artificial Sequence
  Synthetic
gagggactcctagaggactggttttagagctagaaatagcaagttaaaataaggctagtccgttatcaacttgaaaaagtggcaccgagtcggtgcgctatattggcacaattccccaatcctctaggagtaaaaacaccgcggatctagattgtaacgcgttaaaccatctagaaggcggtttttttt

SEQ ID NO: 1547 - DNA, 187 bp, Artificial Sequence
  Synthetic
gagggactcctagaggactggttttagagctagaaatagcaagttaaaataaggctagtccgttatcaacttgaaaaagtggcaccgagtcggtgcatattggcacaattccccaatcctctaggagtcaaaaacaccgcggatctagattgtaacgcgttaaaccatctagaaggcggtttttttt

SEQ ID NO: 1548 - DNA, 186 bp, Artificial Sequence
  Synthetic
gagggactcctagaggactggttttagagctagaaatagcaagttaaaataaggctagtccgttatcaacttgaaaaagtggcaccgagtcggtgcatattggcacaattccccaatcctctaggagtaaaaacaccgcggatctagattgtaacgcgttaaaccatctagaaggcggtttttttt

SEQ ID NO: 1549 - DNA, 189 bp, Artificial Sequence
  Synthetic
gagggactcctagaggactggttttagagctagaaatagcaagttaaaataaggctagtccgttatcaacttgaaaaagtggcaccgagtcggtgcgctatattggcacaattccccaatcctctaggagtaaaaacaccgcgtcgctaccgcccggcgcgttaaacacactagaaggcggtttttttt

SEQ ID NO: 1550 - DNA, 187 bp, Artificial Sequence
  Synthetic
gagggactcctagaggactggttttagagctagaaatagcaagttaaaataaggctagtccgttatcaacttgaaaaagtggcaccgagtcggtgcatattggcacaattccccaatcctctaggagtcaaaaacaccgcgtcgctaccgcccggcgcgttaaacacactagaaggcggtttttttt

SEQ ID NO: 1551 - DNA, 186 bp, Artificial Sequence
  Synthetic
gagggactcctagaggactggttttagagctagaaatagcaagttaaaataaggctagtccgttatcaacttgaaaaagtggcaccgagtcggtgcatattggcacaattccccaatcctctaggagtaaaaacaccgcgtcgctaccgcccggcgcgttaaacacactagaaggcggtttttttt

SEQ ID NO: 1552 - DNA, 166 bp, Artificial Sequence
  Synthetic
gagggactcctagaggactggttttagagctagaaatagcaagttaaaataaggctagtccgttatcaacttgaaaaagtggcaccgagtcggtgcgctatattggcacaattccccaatcctctaggagtaaaaacacgggtccgggtctgggtctgggtttttt

SEQ ID NO: 1553 - DNA, 164 bp, Artificial Sequence
  Synthetic
gagggactcctagaggactggttttagagctagaaatagcaagttaaaataaggctagtccgttatcaacttgaaaaagtggcaccgagtcggtgcatattggcacaattccccaatcctctaggagtcaaaaacacgggtccgggtctgggtctgggtttttt

SEQ ID NO: 1554 - DNA, 163 bp, Artificial Sequence
  Synthetic
gagggactcctagaggactggttttagagctagaaatagcaagttaaaataaggctagtccgttatcaacttgaaaaagtggcaccgagtcggtgcatattggcacaattccccaatcctctaggagtaaaaacacgggtccgggtctgggtctgggtttttt

SEQ ID NO: 1555 - DNA, 164 bp, Artificial Sequence
  Synthetic
gagggactcctagaggactggttttagagctagaaatagcaagttaaaataaggctagtccgttatcaacttgaaaaagtggcaccgagtcggtgcgctatattggcacaattccccaatcctctaggagtaaaaacacgggctctgggtgggccgggtttttt

SEQ ID NO: 1556 - DNA, 162 bp, Artificial Sequence
  Synthetic
gagggactcctagaggactggttttagagctagaaatagcaagttaaaataaggctagtccgttatcaacttgaaaaagtggcaccgagtcggtgcatattggcacaattccccaatcctctaggagtcaaaaacacgggctctgggtgggccgggtttttt

SEQ ID NO: 1557 - DNA, 161 bp, Artificial Sequence
  Synthetic
gagggactcctagaggactggttttagagctagaaatagcaagttaaaataaggctagtccgttatcaacttgaaaaagtggcaccgagtcggtgcatattggcacaattccccaatcctctaggagtaaaaacacgggctctgggtgggccgggtttttt

SEQ ID NO: 1558 - DNA, 163 bp, Artificial Sequence
  Synthetic
gagggactcctagaggactggttttagagctagaaatagcaagttaaaataaggctagtccgttatcaacttgaaaaagtggcaccgagtcggtgcgctatattggcacaattccccaatcctctaggagtaaaaacacgggctgggctgggcagggtttttt

SEQ ID NO: 1559 - DNA, 161 bp, Artificial Sequence
  Synthetic
gagggactcctagaggactggttttagagctagaaatagcaagttaaaataaggctagtccgttatcaacttgaaaaagtggcaccgagtcggtgcatattggcacaattccccaatcctctaggagtcaaaaacacgggctgggctgggcagggtttttt

SEQ ID NO: 1560 - DNA, 160 bp, Artificial Sequence
  Synthetic
gagggactcctagaggactggttttagagctagaaatagcaagttaaaataaggctagtccgttatcaacttgaaaaagtggcaccgagtcggtgcatattggcacaattccccaatcctctaggagtaaaaacacgggctgggctgggcagggtttttt

SEQ ID NO: 1561 - DNA, 162 bp, Artificial Sequence
  Synthetic
gagggactcctagaggactggttttagagctagaaatagcaagttaaaataaggctagtccgttatcaacttgaaaaagtggcaccgagtcggtgcgctatattggcacaattccccaatcctctaggagtaaaaacacgggtgggctgggaagggtttttt

SEQ ID NO: 1562 - DNA, 160 bp, Artificial Sequence
  Synthetic
gagggactcctagaggactggttttagagctagaaatagcaagttaaaataaggctagtccgttatcaacttgaaaaagtggcaccgagtcggtgcatattggcacaattccccaatcctctaggagtcaaaaacacgggtgggctgggaagggtttttt

SEQ ID NO: 1563 - DNA, 159 bp, Artificial Sequence
  Synthetic
gagggactcctagaggactggttttagagctagaaatagcaagttaaaataaggctagtccgttatcaacttgaaaaagtggcaccgagtcggtgcatattggcacaattccccaatcctctaggagtaaaaacacgggtgggctgggaagggtttttt

SEQ ID NO: 1564 - DNA, 162 bp, Artificial Sequence
  Synthetic
gagggactcctagaggactggttttagagctagaaatagcaagttaaaataaggctagtccgttatcaacttgaaaaagtggcaccgagtcggtgcgctatattggcacaattccccaatcctctaggagtaaaaacacgggagggagggctagggtttttt

SEQ ID NO: 1565 - DNA, 160 bp, Artificial Sequence
  Synthetic
gagggactcctagaggactggttttagagctagaaatagcaagttaaaataaggctagtccgttatcaacttgaaaaagtggcaccgagtcggtgcatattggcacaattccccaatcctctaggagtcaaaaacacgggagggagggctagggtttttt

SEQ ID NO: 1566 - DNA, 159 bp, Artificial Sequence
  Synthetic
gagggactcctagaggactggttttagagctagaaatagcaagttaaaataaggctagtccgttatcaacttgaaaaagtggcaccgagtcggtgcatattggcacaattccccaatcctctaggagtaaaaacacgggagggagggctagggtttttt

SEQ ID NO: 1567 - DNA, 164 bp, Artificial Sequence
  Synthetic
gagggactcctagaggactggttttagagctagaaatagcaagttaaaataaggctagtccgttatcaacttgaaaaagtggcaccgagtcggtgcgctatattggcacaattccccaatcctctaggagtaaaaacacgggcagggtctgggctgggtttttt

SEQ ID NO: 1568 - DNA, 162 bp, Artificial Sequence
  Synthetic
gagggactcctagaggactggttttagagctagaaatagcaagttaaaataaggctagtccgttatcaacttgaaaaagtggcaccgagtcggtgcatattggcacaattccccaatcctctaggagtcaaaaacacgggcagggtctgggctgggtttttt

SEQ ID NO: 1569 - DNA, 161 bp, Artificial Sequence
  Synthetic
gagggactcctagaggactggttttagagctagaaatagcaagttaaaataaggctagtccgttatcaacttgaaaaagtggcaccgagtcggtgcatattggcacaattccccaatcctctaggagtaaaaacacgggcagggtctgggctgggtttttt

SEQ ID NO: 1570 - DNA, 165 bp, Artificial Sequence
  Synthetic
gagggactcctagaggactggttttagagctagaaatagcaagttaaaataaggctagtccgttatcaacttgaaaaagtggcaccgagtcggtgcgctatattggcacaattccccaatcctctaggagtaaaaacacgggacagggcagggacagggtttttt

SEQ ID NO: 1571 - DNA, 163 bp, Artificial Sequence
  Synthetic
gagggactcctagaggactggttttagagctagaaatagcaagttaaaataaggctagtccgttatcaacttgaaaaagtggcaccgagtcggtgcatattggcacaattccccaatcctctaggagtcaaaaacacgggacagggcagggacagggtttttt

SEQ ID NO: 1572 - DNA, 162 bp, Artificial Sequence
  Synthetic
gagggactcctagaggactggttttagagctagaaatagcaagttaaaataaggctagtccgttatcaacttgaaaaagtggcaccgagtcggtgcatattggcacaattccccaatcctctaggagtaaaaacacgggacagggcagggacagggtttttt

SEQ ID NO: 1573 - DNA, 161 bp, Artificial Sequence
  Synthetic
gagggactcctagaggactggttttagagctagaaatagcaagttaaaataaggctagtccgttatcaacttgaaaaagtggcaccgagtcggtgcgctatattggcacaattccccaatcctctaggagtaaaaacacgggtgggagggctgggtttttt

SEQ ID NO: 1574 - DNA, 159 bp, Artificial Sequence
  Synthetic
gagggactcctagaggactggttttagagctagaaatagcaagttaaaataaggctagtccgttatcaacttgaaaaagtggcaccgagtcggtgcatattggcacaattccccaatcctctaggagtcaaaaacacgggtgggagggctgggtttttt

SEQ ID NO: 1575 - DNA, 158 bp, Artificial Sequence
  Synthetic
gagggactcctagaggactggttttagagctagaaatagcaagttaaaataaggctagtccgttatcaacttgaaaaagtggcaccgagtcggtgcatattggcacaattccccaatcctctaggagtaaaaacacgggtgggagggctgggtttttt

SEQ ID NO: 1576 - DNA, 164 bp, Artificial Sequence
  Synthetic
gagggactcctagaggactggttttagagctagaaatagcaagttaaaataaggctagtccgttatcaacttgaaaaagtggcaccgagtcggtgcgctatattggcacaattccccaatcctctaggagtaaaaacacgggctgggatgggaaagggtttttt

SEQ ID NO: 1577 - DNA, 162 bp, Artificial Sequence
  Synthetic
gagggactcctagaggactggttttagagctagaaatagcaagttaaaataaggctagtccgttatcaacttgaaaaagtggcaccgagtcggtgcatattggcacaattccccaatcctctaggagtcaaaaacacgggctgggatgggaaagggtttttt

SEQ ID NO: 1578 - DNA, 161 bp, Artificial Sequence
  Synthetic
gagggactcctagaggactggttttagagctagaaatagcaagttaaaataaggctagtccgttatcaacttgaaaaagtggcaccgagtcggtgcatattggcacaattccccaatcctctaggagtaaaaacacgggctgggatgggaaagggtttttt

SEQ ID NO: 1579 - DNA, 162 bp, Artificial Sequence
  Synthetic
gagggactcctagaggactggttttagagctagaaatagcaagttaaaataaggctagtccgttatcaacttgaaaaagtggcaccgagtcggtgcgctatattggcacaattccccaatcctctaggagtaaaaacacgggcagggctgggagggtttttt

SEQ ID NO: 1580 - DNA, 160 bp, Artificial Sequence
  Synthetic
gagggactcctagaggactggttttagagctagaaatagcaagttaaaataaggctagtccgttatcaacttgaaaaagtggcaccgagtcggtgcatattggcacaattccccaatcctctaggagtcaaaaacacgggcagggctgggagggtttttt

SEQ ID NO: 1581 - DNA, 159 bp, Artificial Sequence
  Synthetic
gagggactcctagaggactggttttagagctagaaatagcaagttaaaataaggctagtccgttatcaacttgaaaaagtggcaccgagtcggtgcatattggcacaattccccaatcctctaggagtaaaaacacgggcagggctgggagggtttttt

SEQ ID NO: 1582 - DNA, 158 bp, Artificial Sequence
  Synthetic
gagggactcctagaggactggttttagagctagaaatagcaagttaaaataaggctagtccgttatcaacttgaaaaagtggcaccgagtcggtgcgctatattggcacaattccccaatcctctaggagtaaaaacactggtggtggtggttttttt

SEQ ID NO: 1583 - DNA, 156 bp, Artificial Sequence
  Synthetic
gagggactcctagaggactggttttagagctagaaatagcaagttaaaataaggctagtccgttatcaacttgaaaaagtggcaccgagtcggtgcatattggcacaattccccaatcctctaggagtcaaaaacactggtggtggtggttttttt

SEQ ID NO: 1584 - DNA, 155 bp, Artificial Sequence
  Synthetic
gagggactcctagaggactggttttagagctagaaatagcaagttaaaataaggctagtccgttatcaacttgaaaaagtggcaccgagtcggtgcatattggcacaattccccaatcctctaggagtaaaaacactggtggtggtggttttttt

SEQ ID NO: 1585 - DNA, 196 bp, Artificial Sequence
  Synthetic
gagggactcctagaggactggttttagagctagaaatagcaagttaaaataaggctagtccgttatcaacttgaaaaagtggcaccgagtcggtgcgctatattggcacaattccccaatcctctaggagtaaaaacacgggtcaggagccccccccctgaacccaggataaccctcaaagtcggggggctttttt

SEQ ID NO: 1586 - DNA, 194 bp, Artificial Sequence
  Synthetic
gagggactcctagaggactggttttagagctagaaatagcaagttaaaataaggctagtccgttatcaacttgaaaaagtggcaccgagtcggtgcatattggcacaattccccaatcctctaggagtcaaaaacacgggtcaggagccccccccctgaacccaggataaccctcaaagtcggggggctttttt

SEQ ID NO: 1587 - DNA, 193 bp, Artificial Sequence
  Synthetic
gagggactcctagaggactggttttagagctagaaatagcaagttaaaataaggctagtccgttatcaacttgaaaaagtggcaccgagtcggtgcatattggcacaattccccaatcctctaggagtaaaaacacgggtcaggagccccccccctgaacccaggataaccctcaaagtcggggggctttttt

SEQ ID NO: 1588 - DNA, 201 bp, Artificial Sequence
  Synthetic
gagggactcctagaggactggttttagagctagaaatagcaagttaaaataaggctagtccgttatcaacttgaaaaagtggcaccgagtcggtgcgctatattggcacaattccccaatcctctaggagtaaaaacacgggtcaggagccccccccctgcacccaggataaccctcaaagtcggggggcaaccctttttt

SEQ ID NO: 1589 - DNA, 199 bp, Artificial Sequence
  Synthetic
gagggactcctagaggactggttttagagctagaaatagcaagttaaaataaggctagtccgttatcaacttgaaaaagtggcaccgagtcggtgcatattggcacaattccccaatcctctaggagtcaaaaacacgggtcaggagccccccccctgcacccaggataaccctcaaagtcggggggcaaccctttttt

SEQ ID NO: 1590 - DNA, 198 bp, Artificial Sequence
  Synthetic
gagggactcctagaggactggttttagagctagaaatagcaagttaaaataaggctagtccgttatcaacttgaaaaagtggcaccgagtcggtgcatattggcacaattccccaatcctctaggagtaaaaacacgggtcaggagccccccccctgcacccaggataaccctcaaagtcggggggcaaccctttttt

SEQ ID NO: 1591 - DNA, 201 bp, Artificial Sequence
  Synthetic
gagggactcctagaggactggttttagagctagaaatagcaagttaaaataaggctagtccgttatcaacttgaaaaagtggcaccgagtcggtgcgctatattggcacaattccccaatcctctaggagtaaaaacacgggtcaggagccccccccctgaacccaggaaaaccctcaaagtcggggggcaaccctttttt

SEQ ID NO: 1592 - DNA, 199 bp, Artificial Sequence
  Synthetic
gagggactcctagaggactggttttagagctagaaatagcaagttaaaataaggctagtccgttatcaacttgaaaaagtggcaccgagtcggtgcatattggcacaattccccaatcctctaggagtcaaaaacacgggtcaggagccccccccctgaacccaggaaaaccctcaaagtcggggggcaaccctttttt

SEQ ID NO: 1593 - DNA, 198 bp, Artificial Sequence
  Synthetic
gagggactcctagaggactggttttagagctagaaatagcaagttaaaataaggctagtccgttatcaacttgaaaaagtggcaccgagtcggtgcatattggcacaattccccaatcctctaggagtaaaaacacgggtcaggagccccccccctgaacccaggaaaaccctcaaagtcggggggcaaccctttttt

SEQ ID NO: 1594 - DNA, 201 bp, Artificial Sequence
  Synthetic
gagggactcctagaggactggttttagagctagaaatagcaagttaaaataaggctagtccgttatcaacttgaaaaagtggcaccgagtcggtgcgctatattggcacaattccccaatcctctaggagtaaaaacacgggtcaggagccccccccctgcacccaggaaaaccctcaaagtcggggggcaaccctttttt

SEQ ID NO: 1595 - DNA, 199 bp, Artificial Sequence
  Synthetic
gagggactcctagaggactggttttagagctagaaatagcaagttaaaataaggctagtccgttatcaacttgaaaaagtggcaccgagtcggtgcatattggcacaattccccaatcctctaggagtcaaaaacacgggtcaggagccccccccctgcacccaggaaaaccctcaaagtcggggggcaaccctttttt

SEQ ID NO: 1596 - DNA, 198 bp, Artificial Sequence
  Synthetic
gagggactcctagaggactggttttagagctagaaatagcaagttaaaataaggctagtccgttatcaacttgaaaaagtggcaccgagtcggtgcatattggcacaattccccaatcctctaggagtaaaaacacgggtcaggagccccccccctgcacccaggaaaaccctcaaagtcggggggcaaccctttttt

SEQ ID NO: 1597 - DNA, 205 bp, Artificial Sequence
  Synthetic
gagggactcctagaggactggttttagagctagaaatagcaagttaaaataaggctagtccgttatcaacttgaaaaagtggcaccgagtcggtgcgctatattggcacaattccccaatcctctaggagtaaaaacacgtcagggtcaggagccccccccctgaacccaggataaccctcaaagtcggggggcaaccctttttt

SEQ ID NO: 1598 - DNA, 203 bp, Artificial Sequence
  Synthetic
gagggactcctagaggactggttttagagctagaaatagcaagttaaaataaggctagtccgttatcaacttgaaaaagtggcaccgagtcggtgcatattggcacaattccccaatcctctaggagtcaaaaacacgtcagggtcaggagccccccccctgaacccaggataaccctcaaagtcggggggcaaccctttttt

SEQ ID NO: 1599 - DNA, 202 bp, Artificial Sequence
  Synthetic
gagggactcctagaggactggttttagagctagaaatagcaagttaaaataaggctagtccgttatcaacttgaaaaagtggcaccgagtcggtgcatattggcacaattccccaatcctctaggagtaaaaacacgtcagggtcaggagccccccccctgaacccaggataaccctcaaagtcggggggcaaccctttttt

SEQ ID NO: 1600 - DNA, 205 bp, Artificial Sequence
  Synthetic
gagggactcctagaggactggttttagagctagaaatagcaagttaaaataaggctagtccgttatcaacttgaaaaagtggcaccgagtcggtgcgctatattggcacaattccccaatcctctaggagtaaaaacacgtcagggtcaggagccccccccctgaacccaggaaaaccctcaaagtcggggggcaaccctttttt

SEQ ID NO: 1601 - DNA, 203 bp, Artificial Sequence
  Synthetic
gagggactcctagaggactggttttagagctagaaatagcaagttaaaataaggctagtccgttatcaacttgaaaaagtggcaccgagtcggtgcatattggcacaattccccaatcctctaggagtcaaaaacacgtcagggtcaggagccccccccctgaacccaggaaaaccctcaaagtcggggggcaaccctttttt

SEQ ID NO: 1602 - DNA, 202 bp, Artificial Sequence
  Synthetic
gagggactcctagaggactggttttagagctagaaatagcaagttaaaataaggctagtccgttatcaacttgaaaaagtggcaccgagtcggtgcatattggcacaattccccaatcctctaggagtaaaaacacgtcagggtcaggagccccccccctgaacccaggaaaaccctcaaagtcggggggcaaccctttttt

SEQ ID NO: 1603 - DNA, 205 bp, Artificial Sequence
  Synthetic
gagggactcctagaggactggttttagagctagaaatagcaagttaaaataaggctagtccgttatcaacttgaaaaagtggcaccgagtcggtgcgctatattggcacaattccccaatcctctaggagtaaaaacacgtcagggtcaggagccccccccctgcacccaggaaaaccctcaaagtcggggggcaaccctttttt

SEQ ID NO: 1604 - DNA, 203 bp, Artificial Sequence
  Synthetic
gagggactcctagaggactggttttagagctagaaatagcaagttaaaataaggctagtccgttatcaacttgaaaaagtggcaccgagtcggtgcatattggcacaattccccaatcctctaggagtcaaaaacacgtcagggtcaggagccccccccctgcacccaggaaaaccctcaaagtcggggggcaaccctttttt

SEQ ID NO: 1605 - DNA, 202 bp, Artificial Sequence
  Synthetic
gagggactcctagaggactggttttagagctagaaatagcaagttaaaataaggctagtccgttatcaacttgaaaaagtggcaccgagtcggtgcatattggcacaattccccaatcctctaggagtaaaaacacgtcagggtcaggagccccccccctgcacccaggaaaaccctcaaagtcggggggcaaccctttttt

SEQ ID NO: 1606 - DNA, 305 bp, Artificial Sequence
  Synthetic
gagggactcctagaggactggttttagagctagaaatagcaagttaaaataaggctagtccgttatcaacttgaaaaagtggcaccgagtcggtgcgctatattggcacaattccccaatcctctaggagtaaaaacacggaattgcgggaaaggggtcaacagccgttcagtaccaagtctcaggggaaactttgagatggccttgcaaagggtatggtaataagctgacggacatggtcctaaccacgcagccaagtcctaagtcaacagatcttctgttgatatggatgcagttcatttttt

SEQ ID NO: 1607 - DNA, 303 bp, Artificial Sequence
  Synthetic
gagggactcctagaggactggttttagagctagaaatagcaagttaaaataaggctagtccgttatcaacttgaaaaagtggcaccgagtcggtgcatattggcacaattccccaatcctctaggagtcaaaaacacggaattgcgggaaaggggtcaacagccgttcagtaccaagtctcaggggaaactttgagatggccttgcaaagggtatggtaataagctgacggacatggtcctaaccacgcagccaagtcctaagtcaacagatcttctgttgatatggatgcagttcatttttt

SEQ ID NO: 1608 - DNA, 302 bp, Artificial Sequence
  Synthetic
gagggactcctagaggactggttttagagctagaaatagcaagttaaaataaggctagtccgttatcaacttgaaaaagtggcaccgagtcggtgcatattggcacaattccccaatcctctaggagtaaaaacacggaattgcgggaaaggggtcaacagccgttcagtaccaagtctcaggggaaactttgagatggccttgcaaagggtatggtaataagctgacggacatggtcctaaccacgcagccaagtcctaagtcaacagatcttctgttgatatggatgcagttcatttttt

SEQ ID NO: 1609 - DNA, 188 bp, Artificial Sequence
  Synthetic
gagggactcctagaggactggttttagagctagaaatagcaagttaaaataaggctagtccgttatcaacttgaaaaagtggcaccgagtcggtgcgctatattggcacaattccccaatcctctaggagtaaaaacacgcgtaacctccatccgagttgcaagagagggaaacgcagtctctttttt

SEQ ID NO: 1610 - DNA, 186 bp, Artificial Sequence
  Synthetic
gagggactcctagaggactggttttagagctagaaatagcaagttaaaataaggctagtccgttatcaacttgaaaaagtggcaccgagtcggtgcatattggcacaattccccaatcctctaggagtcaaaaacacgcgtaacctccatccgagttgcaagagagggaaacgcagtctctttttt

SEQ ID NO: 1611 - DNA, 185 bp, Artificial Sequence
  Synthetic
gagggactcctagaggactggttttagagctagaaatagcaagttaaaataaggctagtccgttatcaacttgaaaaagtggcaccgagtcggtgcatattggcacaattccccaatcctctaggagtaaaaacacgcgtaacctccatccgagttgcaagagagggaaacgcagtctctttttt

SEQ ID NO: 1612 - DNA, 188 bp, Artificial Sequence
  Synthetic
gcgtaacctccatccgagttgcaagagagggaaacgcagtctcgagggactcctagaggactggttttagagctagaaatagcaagttaaaataaggctagtccgttatcaacttgaaaaagtggcaccgagtcggtgcgctatattggcacaattccccaatcctctaggagtaaaaacactttttt

SEQ ID NO: 1613 - DNA, 186 bp, Artificial Sequence
  Synthetic
gcgtaacctccatccgagttgcaagagagggaaacgcagtctcgagggactcctagaggactggttttagagctagaaatagcaagttaaaataaggctagtccgttatcaacttgaaaaagtggcaccgagtcggtgcatattggcacaattccccaatcctctaggagtcaaaaacactttttt

SEQ ID NO: 1614 - DNA, 185 bp, Artificial Sequence
  Synthetic
gcgtaacctccatccgagttgcaagagagggaaacgcagtctcgagggactcctagaggactggttttagagctagaaatagcaagttaaaataaggctagtccgttatcaacttgaaaaagtggcaccgagtcggtgcatattggcacaattccccaatcctctaggagtaaaaacactttttt

SEQ ID NO: 1615 - DNA, 137 bp, Artificial Sequence
  Synthetic
gagggactcctagaggactggtttaagagctagaaatagcaagtttaaataaggctagtccgttatcaacttgaaaaagtggcaccgagtcggtgcgctatattggcacaattccccaatcctctaggagttttttt

SEQ ID NO: 1616 - DNA, 137 bp, Artificial Sequence
  Synthetic
gagggactcctagaggactggtttcagagctagaaatagcaagttgaaataaggctagtccgttatcaacttgaaaaagtggcaccgagtcggtgcgctatattggcacaattccccaatcctctaggagttttttt

SEQ ID NO: 1617 - DNA, 137 bp, Artificial Sequence
  Synthetic
gagggactcctagaggactggtttgagagctagaaatagcaagttcaaataaggctagtccgttatcaacttgaaaaagtggcaccgagtcggtgcgctatattggcacaattccccaatcctctaggagttttttt

SEQ ID NO: 1618 - DNA, 137 bp, Artificial Sequence
  Synthetic
gatggactccgggaggactggttttagagctagaaatagcaagttaaaataaggctagtccgttatcaacttgaaaaagtggcaccgagtcggtgcgctatattggcaccattccccagtcctcccggagttttttt

SEQ ID NO: 1619 - DNA, 135 bp, Artificial Sequence
  Synthetic
gatggactccgggaggactggttttagagctagaaatagcaagttaaaataaggctagtccgttatcaacttgaaaaagtggcaccgagtcggtgcatattggcaccattccccagtcctcccggagtctttttt

SEQ ID NO: 1620 - DNA, 134 bp, Artificial Sequence
  Synthetic
gatggactccgggaggactggttttagagctagaaatagcaagttaaaataaggctagtccgttatcaacttgaaaaagtggcaccgagtcggtgcatattggcaccattccccagtcctcccggagttttttt

SEQ ID NO: 1621 - DNA, 187 bp, Artificial Sequence
  Synthetic
gatggactccgggaggactggttttagagctagaaatagcaagttaaaataaggctagtccgttatcaacttgaaaaagtggcaccgagtcggtgcgctatattggcaccattccccagtcctcccggagtagacacacttgacgcggttctatctagttacgcgttaaaccaactagaaatttttt

SEQ ID NO: 1622 - DNA, 185 bp, Artificial Sequence
  Synthetic
gatggactccgggaggactggttttagagctagaaatagcaagttaaaataaggctagtccgttatcaacttgaaaaagtggcaccgagtcggtgcatattggcaccattccccagtcctcccggagtcagacacacttgacgcggttctatctagttacgcgttaaaccaactagaaatttttt

SEQ ID NO: 1623 - DNA, 184 bp, Artificial Sequence
  Synthetic
gatggactccgggaggactggttttagagctagaaatagcaagttaaaataaggctagtccgttatcaacttgaaaaagtggcaccgagtcggtgcatattggcaccattccccagtcctcccggagtagacacacttgacgcggttctatctagttacgcgttaaaccaactagaaatttttt

SEQ ID NO: 1624 - DNA, 137 bp, Artificial Sequence
  Synthetic
gatggactccgggaggactggttttagagctagaaatagcaagttaaaataaggctagtccgttatcaacttgaaaaagtggcaccgagtcggtgcgctatattggcaccattccccaatcctcccggagttttttt

SEQ ID NO: 1625 - DNA, 135 bp, Artificial Sequence
  Synthetic
gatggactccgggaggactggttttagagctagaaatagcaagttaaaataaggctagtccgttatcaacttgaaaaagtggcaccgagtcggtgcatattggcaccattccccaatcctcccggagtctttttt

SEQ ID NO: 1626 - DNA, 134 bp, Artificial Sequence
  Synthetic
gatggactccgggaggactggttttagagctagaaatagcaagttaaaataaggctagtccgttatcaacttgaaaaagtggcaccgagtcggtgcatattggcaccattccccaatcctcccggagttttttt

SEQ ID NO: 1627 - DNA, 187 bp, Artificial Sequence
  Synthetic
gatggactccgggaggactggttttagagctagaaatagcaagttaaaataaggctagtccgttatcaacttgaaaaagtggcaccgagtcggtgcgctatattggcaccattccccaatcctcccggagtagacacacttgacgcggttctatctagttacgcgttaaaccaactagaaatttttt

SEQ ID NO: 1628 - DNA, 185 bp, Artificial Sequence
  Synthetic
gatggactccgggaggactggttttagagctagaaatagcaagttaaaataaggctagtccgttatcaacttgaaaaagtggcaccgagtcggtgcatattggcaccattccccaatcctcccggagtcagacacacttgacgcggttctatctagttacgcgttaaaccaactagaaatttttt

SEQ ID NO: 1629 - DNA, 184 bp, Artificial Sequence
  Synthetic
gatggactccgggaggactggttttagagctagaaatagcaagttaaaataaggctagtccgttatcaacttgaaaaagtggcaccgagtcggtgcatattggcaccattccccaatcctcccggagtagacacacttgacgcggttctatctagttacgcgttaaaccaactagaaatttttt

SEQ ID NO: 1630 - DNA, 192 bp, Artificial Sequence
  Synthetic
gatggactccgggaggactggttttagagctagaaatagcaagttaaaataaggctagtccgttatcaacttgaaaaagtggcaccgagtcggtgcgctatattggcaccattccccaatcctcccggagtccatcagacacacttgacgcggttctatctagttacgcgttaaaccaactagaaatttttt

SEQ ID NO: 1631 - DNA, 189 bp, Artificial Sequence
  Synthetic
gatggactccgggaggactggttttagagctagaaatagcaagttaaaataaggctagtccgttatcaacttgaaaaagtggcaccgagtcggtgcatattggcaccattccccaatcctcccggagtccatcagacacacttgacgcggttctatctagttacgcgttaaaccaactagaaatttttt

SEQ ID NO: 1632 - DNA, 190 bp, Artificial Sequence
  Synthetic
gatggactccgggaggactggttttagagctagaaatagcaagttaaaataaggctagtccgttatcaacttgaaaaagtggcaccgagtcggtgcgctatattggcaccattccccaatcctcccggagtccaagacacacttgacgcggttctatctagttacgcgttaaaccaactagaaatttttt

SEQ ID NO: 1633 - DNA, 187 bp, Artificial Sequence
  Synthetic
gatggactccgggaggactggttttagagctagaaatagcaagttaaaataaggctagtccgttatcaacttgaaaaagtggcaccgagtcggtgcatattggcaccattccccaatcctcccggagtccaagacacacttgacgcggttctatctagttacgcgttaaaccaactagaaatttttt

SEQ ID NO: 1634 - DNA, 21 bp, Artificial Sequence
  Synthetic
gagcccagtgagaagcagagt

SEQ ID NO: 1635 - DNA, 21 bp, Artificial Sequence
  Synthetic
gaaagctcccagagcaaagct

SEQ ID NO: 1636 - DNA, 20 bp, Artificial Sequence
  Synthetic
gcagaacaggcactcattca

SEQ ID NO: 1637 - DNA, 20 bp, Artificial Sequence
  Synthetic
gacaaaggccaaaagccatg

SEQ ID NO: 1638 - DNA, 177 bp, Artificial Sequence
  Synthetic
gatggactccgggaggactggttttagagctagaaatagcaagttaaaataaggctagtccgttatcaacttgaaaaagtggcaccgagtcggtgctatattgcaccattccccaatcctcccggagtcaaagaacccgcggttctatctagttacgcgttaaaccaactagaattt

SEQ ID NO: 1639 - DNA, 180 bp, Artificial Sequence
  Synthetic
gatggactccgggaggactggttttagagctagaaatagcaagttaaaataaggctagtccgttatcaacttgaaaaagtggcaccgagtcggtgcagctatattgcaccattccccaatcctcccggagtcaaagaactcgcggttctatctagttacgcgttaaaccaactagaattt

SEQ ID NO: 1640 - DNA, 177 bp, Artificial Sequence
  Synthetic
gatggactccgggaggactggttttagagctagaaatagcaagttaaaataaggctagtccgttatcaacttgaaaaagtggcaccgagtcggtgcatattgacaccattccccaatcctcccggagtcagaaaccgcgcggttctatctagttacgcgttaaaccaactagaattt

SEQ ID NO: 1641 - DNA, 181 bp, Artificial Sequence
  Synthetic
gatggactccgggaggactggttttagagctagaaatagcaagttaaaataaggctagtccgttatcaacttgaaaaagtggcaccgagtcggtgcagctatattgacaccattccccaatcctcccggagtcagaaattacgcggttctatctagttacgcgttaaaccaactagaattt

SEQ ID NO: 1642 - DNA, 177 bp, Artificial Sequence
  Synthetic
ccgggaggactggggaatgggttttagagctagaaatagcaagttaaaataaggctagtccgttatcaacttgaaaaagtggcaccgagtcggtgcgcacagctatattgacacaattccccagtcctcatttacaacgcggttctatctagttacgcgttaaaccaactagaattt

SEQ ID NO: 1643 - DNA, 173 bp, Artificial Sequence
  Synthetic
ccgggaggactggggaatgggttttagagctagaaatagcaagttaaaataaggctagtccgttatcaacttgaaaaagtggcaccgagtcggtgcagctatattgacacaattccccagtcctcatttacaccgcggttctatctagttacgcgttaaaccaactagaattt

SEQ ID NO: 1644 - DNA, 175 bp, Artificial Sequence
  Synthetic
cagagtacgttgccaccagagttttagagctagaaatagcaagttaaaataaggctagtccgttatcaacttgaaaaagtggcaccgagtcggtgcaagtaagggctctagggagcgacaccggctggtggcaaccgcggttctatctagttacgcgttaaaccaactagaattt

SEQ ID NO: 1645 - DNA, 179 bp, Artificial Sequence
  Synthetic
cagagtacgttgccaccagagttttagagctagaaatagcaagttaaaataaggctagtccgttatcaacttgaaaaagtggcaccgagtcggtgcacccaagtaagggctctagggagcgacaccggctggtggcaaccgcggttctatctagttacgcgttaaaccaactagaattt

SEQ ID NO: 1646 - DNA, 177 bp, Artificial Sequence
  Synthetic
gatggactccgggaggactggttttagagctagaaatagcaagttaaaataaggctagtccgttatcaacttgaaaaagtggcaccgagtcggtgctatattgcaccattccccagtcctcccggagtcaaaaacaccgcggttctatctagttacgcgttaaaccaactagaattt

SEQ ID NO: 1647 - DNA, 317 bp, Artificial Sequence
  Synthetic
tacgtgacgtagaaagtaataatttcttgggtagtttgcagttttaaaattatgttttaaaatggactatcatatgcttaccgtaacttgaaagtatttcgatttcttggctttatatatcttgtggaaaggacgaaacaccgactccgggaggactggggaagttttagagctagaaatagcaagttaaaataaggctagtccgttatcaacttgaaaaagtggcaccgagtcggtgccacagctatattgcaccattccccagtcctttttttcgaagatctactgcgaaagcagcggtacagacagttagattt

SEQ ID NO: 1648 - DNA, 319 bp, Artificial Sequence
  Synthetic
tacgtgacgtagaaagtaataatttcttgggtagtttgcagttttaaaattatgttttaaaatggactatcatatgcttaccgtaacttgaaagtatttcgatttcttggctttatatatcttgtggaaaggacgaaacaccgactccgggaggactggggaagttttagagctagaaatagcaagttaaaataaggctagtccgttatcaacttgaaaaagtggcaccgagtcggtgcggcacagctatattgcaccattccccagtcctttttttcgaagatctactgcgaaagcagcggtacagacagttagattt

SEQ ID NO: 1649 - DNA, 320 bp, Artificial Sequence
  Synthetic
tacgtgacgtagaaagtaataatttcttgggtagtttgcagttttaaaattatgttttaaaatggactatcatatgcttaccgtaacttgaaagtatttcgatttcttggctttatatatcttgtggaaaggacgaaacaccgactccgggaggactggggaagttttagagctagaaatagcaagttaaaataaggctagtccgttatcaacttgaaaaagtggcaccgagtcggtgccggcacagctatattgcaccattccccagtcctttttttcgaagatctactgcgaaagcagcggtacagacagttagattt

SEQ ID NO: 1650 - DNA, 321 bp, Artificial Sequence
  Synthetic
tacgtgacgtagaaagtaataatttcttgggtagtttgcagttttaaaattatgttttaaaatggactatcatatgcttaccgtaacttgaaagtatttcgatttcttggctttatatatcttgtggaaaggacgaaacaccgactccgggaggactggggaagttttagagctagaaatagcaagttaaaataaggctagtccgttatcaacttgaaaaagtggcaccgagtcggtgctcggcacagctatattgcaccattccccagtcctttttttcgaagatctactgcgaaagcagcggtacagacagttagattt

SEQ ID NO: 1651 - DNA, 318 bp, Artificial Sequence
  Synthetic
tacgtgacgtagaaagtaataatttcttgggtagtttgcagttttaaaattatgttttaaaatggactatcatatgcttaccgtaacttgaaagtatttcgatttcttggctttatatatcttgtggaaaggacgaaacaccgactccgggaggactggggaagttttagagctagaaatagcaagttaaaataaggctagtccgttatcaacttgaaaaagtggcaccgagtcggtgccacagctatattgcaccattccccagtcctcttttttcgaagatctactgcgaaagcagcggtacagacagttagattt

SEQ ID NO: 1652 - DNA, 319 bp, Artificial Sequence
  Synthetic
tacgtgacgtagaaagtaataatttcttgggtagtttgcagttttaaaattatgttttaaaatggactatcatatgcttaccgtaacttgaaagtatttcgatttcttggctttatatatcttgtggaaaggacgaaacaccgactccgggaggactggggaagttttagagctagaaatagcaagttaaaataaggctagtccgttatcaacttgaaaaagtggcaccgagtcggtgcgcacagctatattgcaccattccccagtcctcttttttcgaagatctactgcgaaagcagcggtacagacagttagattt

SEQ ID NO: 1653 - DNA, 320 bp, Artificial Sequence
  Synthetic
tacgtgacgtagaaagtaataatttcttgggtagtttgcagttttaaaattatgttttaaaatggactatcatatgcttaccgtaacttgaaagtatttcgatttcttggctttatatatcttgtggaaaggacgaaacaccgactccgggaggactggggaagttttagagctagaaatagcaagttaaaataaggctagtccgttatcaacttgaaaaagtggcaccgagtcggtgcggcacagctatattgcaccattccccagtcctcttttttcgaagatctactgcgaaagcagcggtacagacagttagattt

SEQ ID NO: 1654 - DNA, 321 bp, Artificial Sequence
  Synthetic
tacgtgacgtagaaagtaataatttcttgggtagtttgcagttttaaaattatgttttaaaatggactatcatatgcttaccgtaacttgaaagtatttcgatttcttggctttatatatcttgtggaaaggacgaaacaccgactccgggaggactggggaagttttagagctagaaatagcaagttaaaataaggctagtccgttatcaacttgaaaaagtggcaccgagtcggtgccggcacagctatattgcaccattccccagtcctcttttttcgaagatctactgcgaaagcagcggtacagacagttagattt

SEQ ID NO: 1655 - DNA, 322 bp, Artificial Sequence
  Synthetic
tacgtgacgtagaaagtaataatttcttgggtagtttgcagttttaaaattatgttttaaaatggactatcatatgcttaccgtaacttgaaagtatttcgatttcttggctttatatatcttgtggaaaggacgaaacaccgactccgggaggactggggaagttttagagctagaaatagcaagttaaaataaggctagtccgttatcaacttgaaaaagtggcaccgagtcggtgctcggcacagctatattgcaccattccccagtcctcttttttcgaagatctactgcgaaagcagcggtacagacagttagattt

SEQ ID NO: 1656 - DNA, 319 bp, Artificial Sequence
  Synthetic
tacgtgacgtagaaagtaataatttcttgggtagtttgcagttttaaaattatgttttaaaatggactatcatatgcttaccgtaacttgaaagtatttcgatttcttggctttatatatcttgtggaaaggacgaaacaccgactccgggaggactggggaagttttagagctagaaatagcaagttaaaataaggctagtccgttatcaacttgaaaaagtggcaccgagtcggtgccacagctatattgcaccattccccagtcctccttttttcgaagatctactgcgaaagcagcggtacagacagttagattt

SEQ ID NO: 1657 - DNA, 321 bp, Artificial Sequence
  Synthetic
tacgtgacgtagaaagtaataatttcttgggtagtttgcagttttaaaattatgttttaaaatggactatcatatgcttaccgtaacttgaaagtatttcgatttcttggctttatatatcttgtggaaaggacgaaacaccgactccgggaggactggggaagttttagagctagaaatagcaagttaaaataaggctagtccgttatcaacttgaaaaagtggcaccgagtcggtgcggcacagctatattgcaccattccccagtcctccttttttcgaagatctactgcgaaagcagcggtacagacagttagattt

SEQ ID NO: 1658 - DNA, 322 bp, Artificial Sequence
  Synthetic
tacgtgacgtagaaagtaataatttcttgggtagtttgcagttttaaaattatgttttaaaatggactatcatatgcttaccgtaacttgaaagtatttcgatttcttggctttatatatcttgtggaaaggacgaaacaccgactccgggaggactggggaagttttagagctagaaatagcaagttaaaataaggctagtccgttatcaacttgaaaaagtggcaccgagtcggtgccggcacagctatattgcaccattccccagtcctccttttttcgaagatctactgcgaaagcagcggtacagacagttagattt

SEQ ID NO: 1659 - DNA, 320 bp, Artificial Sequence
  Synthetic
tacgtgacgtagaaagtaataatttcttgggtagtttgcagttttaaaattatgttttaaaatggactatcatatgcttaccgtaacttgaaagtatttcgatttcttggctttatatatcttgtggaaaggacgaaacaccgactccgggaggactggggaagttttagagctagaaatagcaagttaaaataaggctagtccgttatcaacttgaaaaagtggcaccgagtcggtgccacagctatattgcaccattccccagtcctcccttttttcgaagatctactgcgaaagcagcggtacagacagttagattt

SEQ ID NO: 1660 - DNA, 322 bp, Artificial Sequence
  Synthetic
tacgtgacgtagaaagtaataatttcttgggtagtttgcagttttaaaattatgttttaaaatggactatcatatgcttaccgtaacttgaaagtatttcgatttcttggctttatatatcttgtggaaaggacgaaacaccgactccgggaggactggggaagttttagagctagaaatagcaagttaaaataaggctagtccgttatcaacttgaaaaagtggcaccgagtcggtgcggcacagctatattgcaccattccccagtcctcccttttttcgaagatctactgcgaaagcagcggtacagacagttagattt

SEQ ID NO: 1661 - DNA, 323 bp, Artificial Sequence
  Synthetic
tacgtgacgtagaaagtaataatttcttgggtagtttgcagttttaaaattatgttttaaaatggactatcatatgcttaccgtaacttgaaagtatttcgatttcttggctttatatatcttgtggaaaggacgaaacaccgactccgggaggactggggaagttttagagctagaaatagcaagttaaaataaggctagtccgttatcaacttgaaaaagtggcaccgagtcggtgccggcacagctatattgcaccattccccagtcctcccttttttcgaagatctactgcgaaagcagcggtacagacagttagattt

SEQ ID NO: 1662 - DNA, 313 bp, Artificial Sequence
  Synthetic
tacgtgacgtagaaagtaataatttcttgggtagtttgcagttttaaaattatgttttaaaatggactatcatatgcttaccgtaacttgaaagtatttcgatttcttggctttatatatcttgtggaaaggacgaaacaccgactccgggaggactggggaagttttagagctagaaatagcaagttaaaataaggctagtccgttatcaacttgaaaaagtggcaccgagtcggtgctattgcaccattccccagtcctcccgttttttcgaagatctactgcgaaagcagcggtacagacagttagattt

SEQ ID NO: 1663 - DNA, 314 bp, Artificial Sequence
  Synthetic
tacgtgacgtagaaagtaataatttcttgggtagtttgcagttttaaaattatgttttaaaatggactatcatatgcttaccgtaacttgaaagtatttcgatttcttggctttatatatcttgtggaaaggacgaaacaccgactccgggaggactggggaagttttagagctagaaatagcaagttaaaataaggctagtccgttatcaacttgaaaaagtggcaccgagtcggtgcatattgcaccattccccagtcctcccgttttttcgaagatctactgcgaaagcagcggtacagacagttagattt

SEQ ID NO: 1664 - DNA, 315 bp, Artificial Sequence
  Synthetic
tacgtgacgtagaaagtaataatttcttgggtagtttgcagttttaaaattatgttttaaaatggactatcatatgcttaccgtaacttgaaagtatttcgatttcttggctttatatatcttgtggaaaggacgaaacaccgactccgggaggactggggaagttttagagctagaaatagcaagttaaaataaggctagtccgttatcaacttgaaaaagtggcaccgagtcggtgctatattgcaccattccccagtcctcccgttttttcgaagatctactgcgaaagcagcggtacagacagttagattt

SEQ ID NO: 1665 - DNA, 316 bp, Artificial Sequence
  Synthetic
tacgtgacgtagaaagtaataatttcttgggtagtttgcagttttaaaattatgttttaaaatggactatcatatgcttaccgtaacttgaaagtatttcgatttcttggctttatatatcttgtggaaaggacgaaacaccgactccgggaggactggggaagttttagagctagaaatagcaagttaaaataaggctagtccgttatcaacttgaaaaagtggcaccgagtcggtgcctatattgcaccattccccagtcctcccgttttttcgaagatctactgcgaaagcagcggtacagacagttagattt

SEQ ID NO: 1666 - DNA, 317 bp, Artificial Sequence
  Synthetic
tacgtgacgtagaaagtaataatttcttgggtagtttgcagttttaaaattatgttttaaaatggactatcatatgcttaccgtaacttgaaagtatttcgatttcttggctttatatatcttgtggaaaggacgaaacaccgactccgggaggactggggaagttttagagctagaaatagcaagttaaaataaggctagtccgttatcaacttgaaaaagtggcaccgagtcggtgcgctatattgcaccattccccagtcctcccgttttttcgaagatctactgcgaaagcagcggtacagacagttagattt

SEQ ID NO: 1667 - DNA, 318 bp, Artificial Sequence
  Synthetic
tacgtgacgtagaaagtaataatttcttgggtagtttgcagttttaaaattatgttttaaaatggactatcatatgcttaccgtaacttgaaagtatttcgatttcttggctttatatatcttgtggaaaggacgaaacaccgactccgggaggactggggaagttttagagctagaaatagcaagttaaaataaggctagtccgttatcaacttgaaaaagtggcaccgagtcggtgcagctatattgcaccattccccagtcctcccgttttttcgaagatctactgcgaaagcagcggtacagacagttagattt

SEQ ID NO: 1668 - DNA, 319 bp, Artificial Sequence
  Synthetic
tacgtgacgtagaaagtaataatttcttgggtagtttgcagttttaaaattatgttttaaaatggactatcatatgcttaccgtaacttgaaagtatttcgatttcttggctttatatatcttgtggaaaggacgaaacaccgactccgggaggactggggaagttttagagctagaaatagcaagttaaaataaggctagtccgttatcaacttgaaaaagtggcaccgagtcggtgccagctatattgcaccattccccagtcctcccgttttttcgaagatctactgcgaaagcagcggtacagacagttagattt

SEQ ID NO: 1669 - DNA, 320 bp, Artificial Sequence
  Synthetic
tacgtgacgtagaaagtaataatttcttgggtagtttgcagttttaaaattatgttttaaaatggactatcatatgcttaccgtaacttgaaagtatttcgatttcttggctttatatatcttgtggaaaggacgaaacaccgactccgggaggactggggaagttttagagctagaaatagcaagttaaaataaggctagtccgttatcaacttgaaaaagtggcaccgagtcggtgcacagctatattgcaccattccccagtcctcccgttttttcgaagatctactgcgaaagcagcggtacagacagttagattt

SEQ ID NO: 1670 - DNA, 321 bp, Artificial Sequence
  Synthetic
tacgtgacgtagaaagtaataatttcttgggtagtttgcagttttaaaattatgttttaaaatggactatcatatgcttaccgtaacttgaaagtatttcgatttcttggctttatatatcttgtggaaaggacgaaacaccgactccgggaggactggggaagttttagagctagaaatagcaagttaaaataaggctagtccgttatcaacttgaaaaagtggcaccgagtcggtgccacagctatattgcaccattccccagtcctcccgttttttcgaagatctactgcgaaagcagcggtacagacagttagattt

SEQ ID NO: 1671 - DNA, 322 bp, Artificial Sequence
  Synthetic
tacgtgacgtagaaagtaataatttcttgggtagtttgcagttttaaaattatgttttaaaatggactatcatatgcttaccgtaacttgaaagtatttcgatttcttggctttatatatcttgtggaaaggacgaaacaccgactccgggaggactggggaagttttagagctagaaatagcaagttaaaataaggctagtccgttatcaacttgaaaaagtggcaccgagtcggtgcgcacagctatattgcaccattccccagtcctcccgttttttcgaagatctactgcgaaagcagcggtacagacagttagattt

SEQ ID NO: 1672 - DNA, 323 bp, Artificial Sequence
  Synthetic
tacgtgacgtagaaagtaataatttcttgggtagtttgcagttttaaaattatgttttaaaatggactatcatatgcttaccgtaacttgaaagtatttcgatttcttggctttatatatcttgtggaaaggacgaaacaccgactccgggaggactggggaagttttagagctagaaatagcaagttaaaataaggctagtccgttatcaacttgaaaaagtggcaccgagtcggtgcggcacagctatattgcaccattccccagtcctcccgttttttcgaagatctactgcgaaagcagcggtacagacagttagattt

SEQ ID NO: 1673 - DNA, 324 bp, Artificial Sequence
  Synthetic
tacgtgacgtagaaagtaataatttcttgggtagtttgcagttttaaaattatgttttaaaatggactatcatatgcttaccgtaacttgaaagtatttcgatttcttggctttatatatcttgtggaaaggacgaaacaccgactccgggaggactggggaagttttagagctagaaatagcaagttaaaataaggctagtccgttatcaacttgaaaaagtggcaccgagtcggtgccggcacagctatattgcaccattccccagtcctcccgttttttcgaagatctactgcgaaagcagcggtacagacagttagattt

SEQ ID NO: 1674 - DNA, 325 bp, Artificial Sequence
  Synthetic
tacgtgacgtagaaagtaataatttcttgggtagtttgcagttttaaaattatgttttaaaatggactatcatatgcttaccgtaacttgaaagtatttcgatttcttggctttatatatcttgtggaaaggacgaaacaccgactccgggaggactggggaagttttagagctagaaatagcaagttaaaataaggctagtccgttatcaacttgaaaaagtggcaccgagtcggtgctcggcacagctatattgcaccattccccagtcctcccgttttttcgaagatctactgcgaaagcagcggtacagacagttagattt

SEQ ID NO: 1675 - DNA, 314 bp, Artificial Sequence
  Synthetic
tacgtgacgtagaaagtaataatttcttgggtagtttgcagttttaaaattatgttttaaaatggactatcatatgcttaccgtaacttgaaagtatttcgatttcttggctttatatatcttgtggaaaggacgaaacaccgactccgggaggactggggaagttttagagctagaaatagcaagttaaaataaggctagtccgttatcaacttgaaaaagtggcaccgagtcggtgctattgcaccattccccagtcctcccggttttttcgaagatctactgcgaaagcagcggtacagacagttagattt

SEQ ID NO: 1676 - DNA, 315 bp, Artificial Sequence
  Synthetic
tacgtgacgtagaaagtaataatttcttgggtagtttgcagttttaaaattatgttttaaaatggactatcatatgcttaccgtaacttgaaagtatttcgatttcttggctttatatatcttgtggaaaggacgaaacaccgactccgggaggactggggaagttttagagctagaaatagcaagttaaaataaggctagtccgttatcaacttgaaaaagtggcaccgagtcggtgcatattgcaccattccccagtcctcccggttttttcgaagatctactgcgaaagcagcggtacagacagttagattt

SEQ ID NO: 1677 - DNA, 316 bp, Artificial Sequence
  Synthetic
tacgtgacgtagaaagtaataatttcttgggtagtttgcagttttaaaattatgttttaaaatggactatcatatgcttaccgtaacttgaaagtatttcgatttcttggctttatatatcttgtggaaaggacgaaacaccgactccgggaggactggggaagttttagagctagaaatagcaagttaaaataaggctagtccgttatcaacttgaaaaagtggcaccgagtcggtgctatattgcaccattccccagtcctcccggttttttcgaagatctactgcgaaagcagcggtacagacagttagattt

SEQ ID NO: 1678 - DNA, 317 bp, Artificial Sequence
  Synthetic
tacgtgacgtagaaagtaataatttcttgggtagtttgcagttttaaaattatgttttaaaatggactatcatatgcttaccgtaacttgaaagtatttcgatttcttggctttatatatcttgtggaaaggacgaaacaccgactccgggaggactggggaagttttagagctagaaatagcaagttaaaataaggctagtccgttatcaacttgaaaaagtggcaccgagtcggtgcctatattgcaccattccccagtcctcccggttttttcgaagatctactgcgaaagcagcggtacagacagttagattt

SEQ ID NO: 1679 - DNA, 318 bp, Artificial Sequence
  Synthetic
tacgtgacgtagaaagtaataatttcttgggtagtttgcagttttaaaattatgttttaaaatggactatcatatgcttaccgtaacttgaaagtatttcgatttcttggctttatatatcttgtggaaaggacgaaacaccgactccgggaggactggggaagttttagagctagaaatagcaagttaaaataaggctagtccgttatcaacttgaaaaagtggcaccgagtcggtgcgctatattgcaccattccccagtcctcccggttttttcgaagatctactgcgaaagcagcggtacagacagttagattt

SEQ ID NO: 1680 - DNA, 319 bp, Artificial Sequence
  Synthetic
tacgtgacgtagaaagtaataatttcttgggtagtttgcagttttaaaattatgttttaaaatggactatcatatgcttaccgtaacttgaaagtatttcgatttcttggctttatatatcttgtggaaaggacgaaacaccgactccgggaggactggggaagttttagagctagaaatagcaagttaaaataaggctagtccgttatcaacttgaaaaagtggcaccgagtcggtgcagctatattgcaccattccccagtcctcccggttttttcgaagatctactgcgaaagcagcggtacagacagttagattt

SEQ ID NO: 1681 - DNA, 320 bp, Artificial Sequence
  Synthetic
tacgtgacgtagaaagtaataatttcttgggtagtttgcagttttaaaattatgttttaaaatggactatcatatgcttaccgtaacttgaaagtatttcgatttcttggctttatatatcttgtggaaaggacgaaacaccgactccgggaggactggggaagttttagagctagaaatagcaagttaaaataaggctagtccgttatcaacttgaaaaagtggcaccgagtcggtgccagctatattgcaccattccccagtcctcccggttttttcgaagatctactgcgaaagcagcggtacagacagttagattt

SEQ ID NO: 1682 - DNA, 321 bp, Artificial Sequence
  Synthetic
tacgtgacgtagaaagtaataatttcttgggtagtttgcagttttaaaattatgttttaaaatggactatcatatgcttaccgtaacttgaaagtatttcgatttcttggctttatatatcttgtggaaaggacgaaacaccgactccgggaggactggggaagttttagagctagaaatagcaagttaaaataaggctagtccgttatcaacttgaaaaagtggcaccgagtcggtgcacagctatattgcaccattccccagtcctcccggttttttcgaagatctactgcgaaagcagcggtacagacagttagattt

SEQ ID NO: 1683 - DNA, 322 bp, Artificial Sequence
  Synthetic
tacgtgacgtagaaagtaataatttcttgggtagtttgcagttttaaaattatgttttaaaatggactatcatatgcttaccgtaacttgaaagtatttcgatttcttggctttatatatcttgtggaaaggacgaaacaccgactccgggaggactggggaagttttagagctagaaatagcaagttaaaataaggctagtccgttatcaacttgaaaaagtggcaccgagtcggtgccacagctatattgcaccattccccagtcctcccggttttttcgaagatctactgcgaaagcagcggtacagacagttagattt

SEQ ID NO: 1684 - DNA, 323 bp, Artificial Sequence
  Synthetic
tacgtgacgtagaaagtaataatttcttgggtagtttgcagttttaaaattatgttttaaaatggactatcatatgcttaccgtaacttgaaagtatttcgatttcttggctttatatatcttgtggaaaggacgaaacaccgactccgggaggactggggaagttttagagctagaaatagcaagttaaaataaggctagtccgttatcaacttgaaaaagtggcaccgagtcggtgcgcacagctatattgcaccattccccagtcctcccggttttttcgaagatctactgcgaaagcagcggtacagacagttagattt

SEQ ID NO: 1685 - DNA, 324 bp, Artificial Sequence
  Synthetic
tacgtgacgtagaaagtaataatttcttgggtagtttgcagttttaaaattatgttttaaaatggactatcatatgcttaccgtaacttgaaagtatttcgatttcttggctttatatatcttgtggaaaggacgaaacaccgactccgggaggactggggaagttttagagctagaaatagcaagttaaaataaggctagtccgttatcaacttgaaaaagtggcaccgagtcggtgcggcacagctatattgcaccattccccagtcctcccggttttttcgaagatctactgcgaaagcagcggtacagacagttagattt

SEQ ID NO: 1686 - DNA, 325 bp, Artificial Sequence
  Synthetic
tacgtgacgtagaaagtaataatttcttgggtagtttgcagttttaaaattatgttttaaaatggactatcatatgcttaccgtaacttgaaagtatttcgatttcttggctttatatatcttgtggaaaggacgaaacaccgactccgggaggactggggaagttttagagctagaaatagcaagttaaaataaggctagtccgttatcaacttgaaaaagtggcaccgagtcggtgccggcacagctatattgcaccattccccagtcctcccggttttttcgaagatctactgcgaaagcagcggtacagacagttagattt

SEQ ID NO: 1687 - DNA, 326 bp, Artificial Sequence
  Synthetic
tacgtgacgtagaaagtaataatttcttgggtagtttgcagttttaaaattatgttttaaaatggactatcatatgcttaccgtaacttgaaagtatttcgatttcttggctttatatatcttgtggaaaggacgaaacaccgactccgggaggactggggaagttttagagctagaaatagcaagttaaaataaggctagtccgttatcaacttgaaaaagtggcaccgagtcggtgctcggcacagctatattgcaccattccccagtcctcccggttttttcgaagatctactgcgaaagcagcggtacagacagttagattt

SEQ ID NO: 1688 - DNA, 311 bp, Artificial Sequence
  Synthetic
tacgtgacgtagaaagtaataatttcttgggtagtttgcagttttaaaattatgttttaaaatggactatcatatgcttaccgtaacttgaaagtatttcgatttcttggctttatatatcttgtggaaaggacgaaacaccgcagagtacgttgccaccagagttttagagctagaaatagcaagttaaaataaggctagtccgttatcaacttgaaaaagtggcaccgagtcggtgcggagcgacaccgtctggtggcaacttttttcgaagatctactgcgaaagcagcggtacagacagttagattt

SEQ ID NO: 1689 - DNA, 313 bp, Artificial Sequence
  Synthetic
tacgtgacgtagaaagtaataatttcttgggtagtttgcagttttaaaattatgttttaaaatggactatcatatgcttaccgtaacttgaaagtatttcgatttcttggctttatatatcttgtggaaaggacgaaacaccgcagagtacgttgccaccagagttttagagctagaaatagcaagttaaaataaggctagtccgttatcaacttgaaaaagtggcaccgagtcggtgcagggagcgacaccgtctggtggcaacttttttcgaagatctactgcgaaagcagcggtacagacagttagattt

SEQ ID NO: 1690 - DNA, 316 bp, Artificial Sequence
  Synthetic
tacgtgacgtagaaagtaataatttcttgggtagtttgcagttttaaaattatgttttaaaatggactatcatatgcttaccgtaacttgaaagtatttcgatttcttggctttatatatcttgtggaaaggacgaaacaccgcagagtacgttgccaccagagttttagagctagaaatagcaagttaaaataaggctagtccgttatcaacttgaaaaagtggcaccgagtcggtgctctagggagcgacaccgtctggtggcaacttttttcgaagatctactgcgaaagcagcggtacagacagttagattt

SEQ ID NO: 1691 - DNA, 318 bp, Artificial Sequence
  Synthetic
tacgtgacgtagaaagtaataatttcttgggtagtttgcagttttaaaattatgttttaaaatggactatcatatgcttaccgtaacttgaaagtatttcgatttcttggctttatatatcttgtggaaaggacgaaacaccgcagagtacgttgccaccagagttttagagctagaaatagcaagttaaaataaggctagtccgttatcaacttgaaaaagtggcaccgagtcggtgcgctctagggagcgacaccgtctggtggcaacttttttcgaagatctactgcgaaagcagcggtacagacagttagattt

SEQ ID NO: 1692 - DNA, 321 bp, Artificial Sequence
  Synthetic
tacgtgacgtagaaagtaataatttcttgggtagtttgcagttttaaaattatgttttaaaatggactatcatatgcttaccgtaacttgaaagtatttcgatttcttggctttatatatcttgtggaaaggacgaaacaccgcagagtacgttgccaccagagttttagagctagaaatagcaagttaaaataaggctagtccgttatcaacttgaaaaagtggcaccgagtcggtgcagggctctagggagcgacaccgtctggtggcaacttttttcgaagatctactgcgaaagcagcggtacagacagttagattt

SEQ ID NO: 1693 - DNA, 312 bp, Artificial Sequence
  Synthetic
tacgtgacgtagaaagtaataatttcttgggtagtttgcagttttaaaattatgttttaaaatggactatcatatgcttaccgtaacttgaaagtatttcgatttcttggctttatatatcttgtggaaaggacgaaacaccgcagagtacgttgccaccagagttttagagctagaaatagcaagttaaaataaggctagtccgttatcaacttgaaaaagtggcaccgagtcggtgcggagcgacaccgtctggtggcaacgttttttcgaagatctactgcgaaagcagcggtacagacagttagattt

SEQ ID NO: 1694 - DNA, 314 bp, Artificial Sequence
  Synthetic
tacgtgacgtagaaagtaataatttcttgggtagtttgcagttttaaaattatgttttaaaatggactatcatatgcttaccgtaacttgaaagtatttcgatttcttggctttatatatcttgtggaaaggacgaaacaccgcagagtacgttgccaccagagttttagagctagaaatagcaagttaaaataaggctagtccgttatcaacttgaaaaagtggcaccgagtcggtgcagggagcgacaccgtctggtggcaacgttttttcgaagatctactgcgaaagcagcggtacagacagttagattt

SEQ ID NO: 1695 - DNA, 317 bp, Artificial Sequence
  Synthetic
tacgtgacgtagaaagtaataatttcttgggtagtttgcagttttaaaattatgttttaaaatggactatcatatgcttaccgtaacttgaaagtatttcgatttcttggctttatatatcttgtggaaaggacgaaacaccgcagagtacgttgccaccagagttttagagctagaaatagcaagttaaaataaggctagtccgttatcaacttgaaaaagtggcaccgagtcggtgctctagggagcgacaccgtctggtggcaacgttttttcgaagatctactgcgaaagcagcggtacagacagttagattt

SEQ ID NO: 1696 - DNA, 319 bp, Artificial Sequence
  Synthetic
tacgtgacgtagaaagtaataatttcttgggtagtttgcagttttaaaattatgttttaaaatggactatcatatgcttaccgtaacttgaaagtatttcgatttcttggctttatatatcttgtggaaaggacgaaacaccgcagagtacgttgccaccagagttttagagctagaaatagcaagttaaaataaggctagtccgttatcaacttgaaaaagtggcaccgagtcggtgcgctctagggagcgacaccgtctggtggcaacgttttttcgaagatctactgcgaaagcagcggtacagacagttagattt

SEQ ID NO: 1697 - DNA, 322 bp, Artificial Sequence
  Synthetic
tacgtgacgtagaaagtaataatttcttgggtagtttgcagttttaaaattatgttttaaaatggactatcatatgcttaccgtaacttgaaagtatttcgatttcttggctttatatatcttgtggaaaggacgaaacaccgcagagtacgttgccaccagagttttagagctagaaatagcaagttaaaataaggctagtccgttatcaacttgaaaaagtggcaccgagtcggtgcagggctctagggagcgacaccgtctggtggcaacgttttttcgaagatctactgcgaaagcagcggtacagacagttagattt

SEQ ID NO: 1698 - DNA, 313 bp, Artificial Sequence
  Synthetic
tacgtgacgtagaaagtaataatttcttgggtagtttgcagttttaaaattatgttttaaaatggactatcatatgcttaccgtaacttgaaagtatttcgatttcttggctttatatatcttgtggaaaggacgaaacaccgcagagtacgttgccaccagagttttagagctagaaatagcaagttaaaataaggctagtccgttatcaacttgaaaaagtggcaccgagtcggtgcggagcgacaccgtctggtggcaacgtttttttcgaagatctactgcgaaagcagcggtacagacagttagattt

SEQ ID NO: 1699 - DNA, 315 bp, Artificial Sequence
  Synthetic
tacgtgacgtagaaagtaataatttcttgggtagtttgcagttttaaaattatgttttaaaatggactatcatatgcttaccgtaacttgaaagtatttcgatttcttggctttatatatcttgtggaaaggacgaaacaccgcagagtacgttgccaccagagttttagagctagaaatagcaagttaaaataaggctagtccgttatcaacttgaaaaagtggcaccgagtcggtgcagggagcgacaccgtctggtggcaacgtttttttcgaagatctactgcgaaagcagcggtacagacagttagattt

SEQ ID NO: 1700 - DNA, 318 bp, Artificial Sequence
  Synthetic
tacgtgacgtagaaagtaataatttcttgggtagtttgcagttttaaaattatgttttaaaatggactatcatatgcttaccgtaacttgaaagtatttcgatttcttggctttatatatcttgtggaaaggacgaaacaccgcagagtacgttgccaccagagttttagagctagaaatagcaagttaaaataaggctagtccgttatcaacttgaaaaagtggcaccgagtcggtgctctagggagcgacaccgtctggtggcaacgtttttttcgaagatctactgcgaaagcagcggtacagacagttagattt

SEQ ID NO: 1701 - DNA, 320 bp, Artificial Sequence
  Synthetic
tacgtgacgtagaaagtaataatttcttgggtagtttgcagttttaaaattatgttttaaaatggactatcatatgcttaccgtaacttgaaagtatttcgatttcttggctttatatatcttgtggaaaggacgaaacaccgcagagtacgttgccaccagagttttagagctagaaatagcaagttaaaataaggctagtccgttatcaacttgaaaaagtggcaccgagtcggtgcgctctagggagcgacaccgtctggtggcaacgtttttttcgaagatctactgcgaaagcagcggtacagacagttagattt

SEQ ID NO: 1702 - DNA, 323 bp, Artificial Sequence
  Synthetic
tacgtgacgtagaaagtaataatttcttgggtagtttgcagttttaaaattatgttttaaaatggactatcatatgcttaccgtaacttgaaagtatttcgatttcttggctttatatatcttgtggaaaggacgaaacaccgcagagtacgttgccaccagagttttagagctagaaatagcaagttaaaataaggctagtccgttatcaacttgaaaaagtggcaccgagtcggtgcagggctctagggagcgacaccgtctggtggcaacgtttttttcgaagatctactgcgaaagcagcggtacagacagttagattt

SEQ ID NO: 1703 - DNA, 314 bp, Artificial Sequence
  Synthetic
tacgtgacgtagaaagtaataatttcttgggtagtttgcagttttaaaattatgttttaaaatggactatcatatgcttaccgtaacttgaaagtatttcgatttcttggctttatatatcttgtggaaaggacgaaacaccgcagagtacgttgccaccagagttttagagctagaaatagcaagttaaaataaggctagtccgttatcaacttgaaaaagtggcaccgagtcggtgcggagcgacaccgtctggtggcaacgtattttttcgaagatctactgcgaaagcagcggtacagacagttagattt

SEQ ID NO: 1704 - DNA, 316 bp, Artificial Sequence
  Synthetic
tacgtgacgtagaaagtaataatttcttgggtagtttgcagttttaaaattatgttttaaaatggactatcatatgcttaccgtaacttgaaagtatttcgatttcttggctttatatatcttgtggaaaggacgaaacaccgcagagtacgttgccaccagagttttagagctagaaatagcaagttaaaataaggctagtccgttatcaacttgaaaaagtggcaccgagtcggtgcagggagcgacaccgtctggtggcaacgtattttttcgaagatctactgcgaaagcagcggtacagacagttagattt

SEQ ID NO: 1705 - DNA, 319 bp, Artificial Sequence
  Synthetic
tacgtgacgtagaaagtaataatttcttgggtagtttgcagttttaaaattatgttttaaaatggactatcatatgcttaccgtaacttgaaagtatttcgatttcttggctttatatatcttgtggaaaggacgaaacaccgcagagtacgttgccaccagagttttagagctagaaatagcaagttaaaataaggctagtccgttatcaacttgaaaaagtggcaccgagtcggtgctctagggagcgacaccgtctggtggcaacgtattttttcgaagatctactgcgaaagcagcggtacagacagttagattt

SEQ ID NO: 1706 - DNA, 321 bp, Artificial Sequence
  Synthetic
tacgtgacgtagaaagtaataatttcttgggtagtttgcagttttaaaattatgttttaaaatggactatcatatgcttaccgtaacttgaaagtatttcgatttcttggctttatatatcttgtggaaaggacgaaacaccgcagagtacgttgccaccagagttttagagctagaaatagcaagttaaaataaggctagtccgttatcaacttgaaaaagtggcaccgagtcggtgcgctctagggagcgacaccgtctggtggcaacgtattttttcgaagatctactgcgaaagcagcggtacagacagttagattt

SEQ ID NO: 1707 - DNA, 324 bp, Artificial Sequence
  Synthetic
tacgtgacgtagaaagtaataatttcttgggtagtttgcagttttaaaattatgttttaaaatggactatcatatgcttaccgtaacttgaaagtatttcgatttcttggctttatatatcttgtggaaaggacgaaacaccgcagagtacgttgccaccagagttttagagctagaaatagcaagttaaaataaggctagtccgttatcaacttgaaaaagtggcaccgagtcggtgcagggctctagggagcgacaccgtctggtggcaacgtattttttcgaagatctactgcgaaagcagcggtacagacagttagattt

SEQ ID NO: 1708 - DNA, 315 bp, Artificial Sequence
  Synthetic
tacgtgacgtagaaagtaataatttcttgggtagtttgcagttttaaaattatgttttaaaatggactatcatatgcttaccgtaacttgaaagtatttcgatttcttggctttatatatcttgtggaaaggacgaaacaccgcagagtacgttgccaccagagttttagagctagaaatagcaagttaaaataaggctagtccgttatcaacttgaaaaagtggcaccgagtcggtgcggagcgacaccgtctggtggcaacgtacttttttcgaagatctactgcgaaagcagcggtacagacagttagattt

SEQ ID NO: 1709 - DNA, 317 bp, Artificial Sequence
  Synthetic
tacgtgacgtagaaagtaataatttcttgggtagtttgcagttttaaaattatgttttaaaatggactatcatatgcttaccgtaacttgaaagtatttcgatttcttggctttatatatcttgtggaaaggacgaaacaccgcagagtacgttgccaccagagttttagagctagaaatagcaagttaaaataaggctagtccgttatcaacttgaaaaagtggcaccgagtcggtgcagggagcgacaccgtctggtggcaacgtacttttttcgaagatctactgcgaaagcagcggtacagacagttagattt

SEQ ID NO: 1710 - DNA, 320 bp, Artificial Sequence
  Synthetic
tacgtgacgtagaaagtaataatttcttgggtagtttgcagttttaaaattatgttttaaaatggactatcatatgcttaccgtaacttgaaagtatttcgatttcttggctttatatatcttgtggaaaggacgaaacaccgcagagtacgttgccaccagagttttagagctagaaatagcaagttaaaataaggctagtccgttatcaacttgaaaaagtggcaccgagtcggtgctctagggagcgacaccgtctggtggcaacgtacttttttcgaagatctactgcgaaagcagcggtacagacagttagattt

SEQ ID NO: 1711 - DNA, 322 bp, Artificial Sequence
  Synthetic
tacgtgacgtagaaagtaataatttcttgggtagtttgcagttttaaaattatgttttaaaatggactatcatatgcttaccgtaacttgaaagtatttcgatttcttggctttatatatcttgtggaaaggacgaaacaccgcagagtacgttgccaccagagttttagagctagaaatagcaagttaaaataaggctagtccgttatcaacttgaaaaagtggcaccgagtcggtgcgctctagggagcgacaccgtctggtggcaacgtacttttttcgaagatctactgcgaaagcagcggtacagacagttagattt

SEQ ID NO: 1712 - DNA, 325 bp, Artificial Sequence
  Synthetic
tacgtgacgtagaaagtaataatttcttgggtagtttgcagttttaaaattatgttttaaaatggactatcatatgcttaccgtaacttgaaagtatttcgatttcttggctttatatatcttgtggaaaggacgaaacaccgcagagtacgttgccaccagagttttagagctagaaatagcaagttaaaataaggctagtccgttatcaacttgaaaaagtggcaccgagtcggtgcagggctctagggagcgacaccgtctggtggcaacgtacttttttcgaagatctactgcgaaagcagcggtacagacagttagattt

SEQ ID NO: 1713 - DNA, 269 bp, Artificial Sequence
  Synthetic
tacgtgacgtagaaagtaataatttcttgggtagtttgcagttttaaaattatgttttaaaatggactatcatatgcttaccgtaacttgaaagtatttcgatttcttggctttatatatcttgtggaaaggacgaaacaccgatggactccgggaggactggttttagagctagaaatagcaagttaaaataaggctagtccgttatcaacttgaaaaagtggcaccgagtcggtgcttgcaccattccccagtcctcccggtttttt

SEQ ID NO: 1714 - DNA, 270 bp, Artificial Sequence
  Synthetic
tacgtgacgtagaaagtaataatttcttgggtagtttgcagttttaaaattatgttttaaaatggactatcatatgcttaccgtaacttgaaagtatttcgatttcttggctttatatatcttgtggaaaggacgaaacaccgatggactccgggaggactggttttagagctagaaatagcaagttaaaataaggctagtccgttatcaacttgaaaaagtggcaccgagtcggtgcattgcaccattccccagtcctcccggtttttt

SEQ ID NO: 1715 - DNA, 276 bp, Artificial Sequence
  Synthetic
tacgtgacgtagaaagtaataatttcttgggtagtttgcagttttaaaattatgttttaaaatggactatcatatgcttaccgtaacttgaaagtatttcgatttcttggctttatatatcttgtggaaaggacgaaacaccgatggactccgggaggactggttttagagctagaaatagcaagttaaaataaggctagtccgttatcaacttgaaaaagtggcaccgagtcggtgctatattgcaccattccccagtcctcccggagttttttt

SEQ ID NO: 1716 - DNA, 277 bp, Artificial Sequence
  Synthetic
tacgtgacgtagaaagtaataatttcttgggtagtttgcagttttaaaattatgttttaaaatggactatcatatgcttaccgtaacttgaaagtatttcgatttcttggctttatatatcttgtggaaaggacgaaacaccgatggactccgggaggactggttttagagctagaaatagcaagttaaaataaggctagtccgttatcaacttgaaaaagtggcaccgagtcggtgctatattgcaccattccccagtcctcccggagtctttttt

SEQ ID NO: 1717 - DNA, 277 bp, Artificial Sequence
  Synthetic
tacgtgacgtagaaagtaataatttcttgggtagtttgcagttttaaaattatgttttaaaatggactatcatatgcttaccgtaacttgaaagtatttcgatttcttggctttatatatcttgtggaaaggacgaaacaccgatggactccgggaggactggttttagagctagaaatagcaagttaaaataaggctagtccgttatcaacttgaaaaagtggcaccgagtcggtgctatattgcaccatttcccagtcctcccggagtctttttt

SEQ ID NO: 1718 - DNA, 315 bp, Artificial Sequence
  Synthetic
tacgtgacgtagaaagtaataatttcttgggtagtttgcagttttaaaattatgttttaaaatggactatcatatgcttaccgtaacttgaaagtatttcgatttcttggctttatatatcttgtggaaaggacgaaacaccactccgggaggactggggaagttttagagctagaaatagcaagttaaaataaggctagtccgttatcaacttgaaaaagtggcaccgagtcggtgcagctatattgcaccattccccagtcctccttttttcgaagatctactgcgaaagcagcggtacagacagttagattt

SEQ ID NO: 1719 - DNA, 316 bp, Artificial Sequence
  Synthetic
tacgtgacgtagaaagtaataatttcttgggtagtttgcagttttaaaattatgttttaaaatggactatcatatgcttaccgtaacttgaaagtatttcgatttcttggctttatatatcttgtggaaaggacgaaacaccactccgggaggactggggaagttttagagctagaaatagcaagttaaaataaggctagtccgttatcaacttgaaaaagtggcaccgagtcggtgcagctatattgcaccattccccagtcctcccttttttcgaagatctactgcgaaagcagcggtacagacagttagattt

SEQ ID NO: 1720 - DNA, 317 bp, Artificial Sequence
  Synthetic
tacgtgacgtagaaagtaataatttcttgggtagtttgcagttttaaaattatgttttaaaatggactatcatatgcttaccgtaacttgaaagtatttcgatttcttggctttatatatcttgtggaaaggacgaaacaccactccgggaggactggggaagttttagagctagaaatagcaagttaaaataaggctagtccgttatcaacttgaaaaagtggcaccgagtcggtgcacagctatattgcaccattccccagtcctccttttttcgaagatctactgcgaaagcagcggtacagacagttagattt

SEQ ID NO: 1721 - DNA, 318 bp, Artificial Sequence
  Synthetic
tacgtgacgtagaaagtaataatttcttgggtagtttgcagttttaaaattatgttttaaaatggactatcatatgcttaccgtaacttgaaagtatttcgatttcttggctttatatatcttgtggaaaggacgaaacaccactccgggaggactggggaagttttagagctagaaatagcaagttaaaataaggctagtccgttatcaacttgaaaaagtggcaccgagtcggtgcacagctatattgcaccattccccagtcctcccttttttcgaagatctactgcgaaagcagcggtacagacagttagattt

SEQ ID NO: 1722 - DNA, 319 bp, Artificial Sequence
  Synthetic
tacgtgacgtagaaagtaataatttcttgggtagtttgcagttttaaaattatgttttaaaatggactatcatatgcttaccgtaacttgaaagtatttcgatttcttggctttatatatcttgtggaaaggacgaaacaccactccgggaggactggggaagttttagagctagaaatagcaagttaaaataaggctagtccgttatcaacttgaaaaagtggcaccgagtcggtgcgcacagctatattgcaccattccccagtcctccttttttcgaagatctactgcgaaagcagcggtacagacagttagattt

SEQ ID NO: 1723 - DNA, 320 bp, Artificial Sequence
  Synthetic
tacgtgacgtagaaagtaataatttcttgggtagtttgcagttttaaaattatgttttaaaatggactatcatatgcttaccgtaacttgaaagtatttcgatttcttggctttatatatcttgtggaaaggacgaaacaccactccgggaggactggggaagttttagagctagaaatagcaagttaaaataaggctagtccgttatcaacttgaaaaagtggcaccgagtcggtgcgcacagctatattgcaccattccccagtcctcccttttttcgaagatctactgcgaaagcagcggtacagacagttagattt

SEQ ID NO: 1724 - DNA, 322 bp, Artificial Sequence
  Synthetic
tacgtgacgtagaaagtaataatttcttgggtagtttgcagttttaaaattatgttttaaaatggactatcatatgcttaccgtaacttgaaagtatttcgatttcttggctttatatatcttgtggaaaggacgaaacaccactccgggaggactggggaagttttagagctagaaatagcaagttaaaataaggctagtccgttatcaacttgaaaaagtggcaccgagtcggtgctcggcacagctatattgcaccattccccagtcctccttttttcgaagatctactgcgaaagcagcggtacagacagttagattt

SEQ ID NO: 1725 - DNA, 323 bp, Artificial Sequence
  Synthetic
tacgtgacgtagaaagtaataatttcttgggtagtttgcagttttaaaattatgttttaaaatggactatcatatgcttaccgtaacttgaaagtatttcgatttcttggctttatatatcttgtggaaaggacgaaacaccactccgggaggactggggaagttttagagctagaaatagcaagttaaaataaggctagtccgttatcaacttgaaaaagtggcaccgagtcggtgctcggcacagctatattgcaccattccccagtcctcccttttttcgaagatctactgcgaaagcagcggtacagacagttagattt

SEQ ID NO: 1726 - DNA, 314 bp, Artificial Sequence
  Synthetic
tacgtgacgtagaaagtaataatttcttgggtagtttgcagttttaaaattatgttttaaaatggactatcatatgcttaccgtaacttgaaagtatttcgatttcttggctttatatatcttgtggaaaggacgaaacaccgcagagtcggcacagctatatgttttagagctagaaatagcaagttaaaataaggctagtccgttatcaacttgaaaaagtggcaccgagtcggtgcgggaatggtgcaatatagctgtgccgattttttcgaagatctactgcgaaagcagcggtacagacagttagattt

SEQ ID NO: 1727 - DNA, 315 bp, Artificial Sequence
  Synthetic
tacgtgacgtagaaagtaataatttcttgggtagtttgcagttttaaaattatgttttaaaatggactatcatatgcttaccgtaacttgaaagtatttcgatttcttggctttatatatcttgtggaaaggacgaaacaccgcagagtcggcacagctatatgttttagagctagaaatagcaagttaaaataaggctagtccgttatcaacttgaaaaagtggcaccgagtcggtgcgggaatggtgcaatatagctgtgccgacttttttcgaagatctactgcgaaagcagcggtacagacagttagattt

SEQ ID NO: 1728 - DNA, 316 bp, Artificial Sequence
  Synthetic
tacgtgacgtagaaagtaataatttcttgggtagtttgcagttttaaaattatgttttaaaatggactatcatatgcttaccgtaacttgaaagtatttcgatttcttggctttatatatcttgtggaaaggacgaaacaccgcagagtcggcacagctatatgttttagagctagaaatagcaagttaaaataaggctagtccgttatcaacttgaaaaagtggcaccgagtcggtgctggggaatggtgcaatatagctgtgccgattttttcgaagatctactgcgaaagcagcggtacagacagttagattt

SEQ ID NO: 1729 - DNA, 317 bp, Artificial Sequence
  Synthetic
tacgtgacgtagaaagtaataatttcttgggtagtttgcagttttaaaattatgttttaaaatggactatcatatgcttaccgtaacttgaaagtatttcgatttcttggctttatatatcttgtggaaaggacgaaacaccgcagagtcggcacagctatatgttttagagctagaaatagcaagttaaaataaggctagtccgttatcaacttgaaaaagtggcaccgagtcggtgctggggaatggtgcaatatagctgtgccgacttttttcgaagatctactgcgaaagcagcggtacagacagttagattt

SEQ ID NO: 1730 - DNA, 318 bp, Artificial Sequence
  Synthetic
tacgtgacgtagaaagtaataatttcttgggtagtttgcagttttaaaattatgttttaaaatggactatcatatgcttaccgtaacttgaaagtatttcgatttcttggctttatatatcttgtggaaaggacgaaacaccgcagagtcggcacagctatatgttttagagctagaaatagcaagttaaaataaggctagtccgttatcaacttgaaaaagtggcaccgagtcggtgcactggggaatggtgcaatatagctgtgccgattttttcgaagatctactgcgaaagcagcggtacagacagttagattt

SEQ ID NO: 1731 - DNA, 319 bp, Artificial Sequence
  Synthetic
tacgtgacgtagaaagtaataatttcttgggtagtttgcagttttaaaattatgttttaaaatggactatcatatgcttaccgtaacttgaaagtatttcgatttcttggctttatatatcttgtggaaaggacgaaacaccgcagagtcggcacagctatatgttttagagctagaaatagcaagttaaaataaggctagtccgttatcaacttgaaaaagtggcaccgagtcggtgcactggggaatggtgcaatatagctgtgccgacttttttcgaagatctactgcgaaagcagcggtacagacagttagattt

SEQ ID NO: 1732 - DNA, 320 bp, Artificial Sequence
  Synthetic
tacgtgacgtagaaagtaataatttcttgggtagtttgcagttttaaaattatgttttaaaatggactatcatatgcttaccgtaacttgaaagtatttcgatttcttggctttatatatcttgtggaaaggacgaaacaccgcagagtcggcacagctatatgttttagagctagaaatagcaagttaaaataaggctagtccgttatcaacttgaaaaagtggcaccgagtcggtgcggactggggaatggtgcaatatagctgtgccgattttttcgaagatctactgcgaaagcagcggtacagacagttagattt

SEQ ID NO: 1733 - DNA, 321 bp, Artificial Sequence
  Synthetic
tacgtgacgtagaaagtaataatttcttgggtagtttgcagttttaaaattatgttttaaaatggactatcatatgcttaccgtaacttgaaagtatttcgatttcttggctttatatatcttgtggaaaggacgaaacaccgcagagtcggcacagctatatgttttagagctagaaatagcaagttaaaataaggctagtccgttatcaacttgaaaaagtggcaccgagtcggtgcggactggggaatggtgcaatatagctgtgccgacttttttcgaagatctactgcgaaagcagcggtacagacagttagattt

SEQ ID NO: 1734 - DNA, 317 bp, Artificial Sequence
  Synthetic
tacgtgacgtagaaagtaataatttcttgggtagtttgcagttttaaaattatgttttaaaatggactatcatatgcttaccgtaacttgaaagtatttcgatttcttggctttatatatcttgtggaaaggacgaaacaccgatggactccgggaggactggttttagagctagaaatagcaagttaaaataaggctagtccgttatcaacttgaaaaagtggcaccgagtcggtgcgctatattgcaccattccccagtcctcccggttttttcgaagatctactgcgaaagcagcggtacagacagttagattt

SEQ ID NO: 1735 - DNA, 320 bp, Artificial Sequence
  Synthetic
tacgtgacgtagaaagtaataatttcttgggtagtttgcagttttaaaattatgttttaaaatggactatcatatgcttaccgtaacttgaaagtatttcgatttcttggctttatatatcttgtggaaaggacgaaacaccgatggactccgggaggactggttttagagctagaaatagcaagttaaaataaggctagtccgttatcaacttgaaaaagtggcaccgagtcggtgcgctatattgcaccattccccagtcctcccggagtttttttcgaagatctactgcgaaagcagcggtacagacagttagattt

SEQ ID NO: 1736 - DNA, 319 bp, Artificial Sequence
  Synthetic
tacgtgacgtagaaagtaataatttcttgggtagtttgcagttttaaaattatgttttaaaatggactatcatatgcttaccgtaacttgaaagtatttcgatttcttggctttatatatcttgtggaaaggacgaaacaccgatggactccgggaggactggttttagagctagaaatagcaagttaaaataaggctagtccgttatcaacttgaaaaagtggcaccgagtcggtgccagctatattgcaccattccccagtcctcccggttttttcgaagatctactgcgaaagcagcggtacagacagttagattt

SEQ ID NO: 1737 - DNA, 322 bp, Artificial Sequence
  Synthetic
tacgtgacgtagaaagtaataatttcttgggtagtttgcagttttaaaattatgttttaaaatggactatcatatgcttaccgtaacttgaaagtatttcgatttcttggctttatatatcttgtggaaaggacgaaacaccgatggactccgggaggactggttttagagctagaaatagcaagttaaaataaggctagtccgttatcaacttgaaaaagtggcaccgagtcggtgccagctatattgcaccattccccagtcctcccggagtttttttcgaagatctactgcgaaagcagcggtacagacagttagattt

SEQ ID NO: 1738 - DNA, 321 bp, Artificial Sequence
  Synthetic
tacgtgacgtagaaagtaataatttcttgggtagtttgcagttttaaaattatgttttaaaatggactatcatatgcttaccgtaacttgaaagtatttcgatttcttggctttatatatcttgtggaaaggacgaaacaccgatggactccgggaggactggttttagagctagaaatagcaagttaaaataaggctagtccgttatcaacttgaaaaagtggcaccgagtcggtgccacagctatattgcaccattccccagtcctcccggttttttcgaagatctactgcgaaagcagcggtacagacagttagattt

SEQ ID NO: 1739 - DNA, 324 bp, Artificial Sequence
  Synthetic
tacgtgacgtagaaagtaataatttcttgggtagtttgcagttttaaaattatgttttaaaatggactatcatatgcttaccgtaacttgaaagtatttcgatttcttggctttatatatcttgtggaaaggacgaaacaccgatggactccgggaggactggttttagagctagaaatagcaagttaaaataaggctagtccgttatcaacttgaaaaagtggcaccgagtcggtgccacagctatattgcaccattccccagtcctcccggagtttttttcgaagatctactgcgaaagcagcggtacagacagttagattt

SEQ ID NO: 1740 - DNA, 323 bp, Artificial Sequence
  Synthetic
tacgtgacgtagaaagtaataatttcttgggtagtttgcagttttaaaattatgttttaaaatggactatcatatgcttaccgtaacttgaaagtatttcgatttcttggctttatatatcttgtggaaaggacgaaacaccgatggactccgggaggactggttttagagctagaaatagcaagttaaaataaggctagtccgttatcaacttgaaaaagtggcaccgagtcggtgcggcacagctatattgcaccattccccagtcctcccggttttttcgaagatctactgcgaaagcagcggtacagacagttagattt

SEQ ID NO: 1741 - DNA, 326 bp, Artificial Sequence
  Synthetic
tacgtgacgtagaaagtaataatttcttgggtagtttgcagttttaaaattatgttttaaaatggactatcatatgcttaccgtaacttgaaagtatttcgatttcttggctttatatatcttgtggaaaggacgaaacaccgatggactccgggaggactggttttagagctagaaatagcaagttaaaataaggctagtccgttatcaacttgaaaaagtggcaccgagtcggtgcggcacagctatattgcaccattccccagtcctcccggagtttttttcgaagatctactgcgaaagcagcggtacagacagttagattt

SEQ ID NO: 1742 - DNA, 313 bp, Artificial Sequence
  Synthetic
tacgtgacgtagaaagtaataatttcttgggtagtttgcagttttaaaattatgttttaaaatggactatcatatgcttaccgtaacttgaaagtatttcgatttcttggctttatatatcttgtggaaaggacgaaacaccgcgggaggactggggaatggtgttttagagctagaaatagcaagttaaaataaggctagtccgttatcaacttgaaaaagtggcaccgagtcggtgcagctatattgcaccattccccagtccttttttcgaagatctactgcgaaagcagcggtacagacagttagattt

SEQ ID NO: 1743 - DNA, 314 bp, Artificial Sequence
  Synthetic
tacgtgacgtagaaagtaataatttcttgggtagtttgcagttttaaaattatgttttaaaatggactatcatatgcttaccgtaacttgaaagtatttcgatttcttggctttatatatcttgtggaaaggacgaaacaccgcgggaggactggggaatggtgttttagagctagaaatagcaagttaaaataaggctagtccgttatcaacttgaaaaagtggcaccgagtcggtgcagctatattgcaccattccccagtcctttttttcgaagatctactgcgaaagcagcggtacagacagttagattt

SEQ ID NO: 1744 - DNA, 315 bp, Artificial Sequence
  Synthetic
tacgtgacgtagaaagtaataatttcttgggtagtttgcagttttaaaattatgttttaaaatggactatcatatgcttaccgtaacttgaaagtatttcgatttcttggctttatatatcttgtggaaaggacgaaacaccgcgggaggactggggaatggtgttttagagctagaaatagcaagttaaaataaggctagtccgttatcaacttgaaaaagtggcaccgagtcggtgcacagctatattgcaccattccccagtccttttttcgaagatctactgcgaaagcagcggtacagacagttagattt

SEQ ID NO: 1745 - DNA, 316 bp, Artificial Sequence
  Synthetic
tacgtgacgtagaaagtaataatttcttgggtagtttgcagttttaaaattatgttttaaaatggactatcatatgcttaccgtaacttgaaagtatttcgatttcttggctttatatatcttgtggaaaggacgaaacaccgcgggaggactggggaatggtgttttagagctagaaatagcaagttaaaataaggctagtccgttatcaacttgaaaaagtggcaccgagtcggtgcacagctatattgcaccattccccagtcctttttttcgaagatctactgcgaaagcagcggtacagacagttagattt

SEQ ID NO: 1746 - DNA, 317 bp, Artificial Sequence
  Synthetic
tacgtgacgtagaaagtaataatttcttgggtagtttgcagttttaaaattatgttttaaaatggactatcatatgcttaccgtaacttgaaagtatttcgatttcttggctttatatatcttgtggaaaggacgaaacaccgcgggaggactggggaatggtgttttagagctagaaatagcaagttaaaataaggctagtccgttatcaacttgaaaaagtggcaccgagtcggtgcgcacagctatattgcaccattccccagtccttttttcgaagatctactgcgaaagcagcggtacagacagttagattt

SEQ ID NO: 1747 - DNA, 318 bp, Artificial Sequence
  Synthetic
tacgtgacgtagaaagtaataatttcttgggtagtttgcagttttaaaattatgttttaaaatggactatcatatgcttaccgtaacttgaaagtatttcgatttcttggctttatatatcttgtggaaaggacgaaacaccgcgggaggactggggaatggtgttttagagctagaaatagcaagttaaaataaggctagtccgttatcaacttgaaaaagtggcaccgagtcggtgcgcacagctatattgcaccattccccagtcctttttttcgaagatctactgcgaaagcagcggtacagacagttagattt

SEQ ID NO: 1748 - DNA, 319 bp, Artificial Sequence
  Synthetic
tacgtgacgtagaaagtaataatttcttgggtagtttgcagttttaaaattatgttttaaaatggactatcatatgcttaccgtaacttgaaagtatttcgatttcttggctttatatatcttgtggaaaggacgaaacaccgcgggaggactggggaatggtgttttagagctagaaatagcaagttaaaataaggctagtccgttatcaacttgaaaaagtggcaccgagtcggtgccggcacagctatattgcaccattccccagtccttttttcgaagatctactgcgaaagcagcggtacagacagttagattt

SEQ ID NO: 1749 - DNA, 320 bp, Artificial Sequence
  Synthetic
tacgtgacgtagaaagtaataatttcttgggtagtttgcagttttaaaattatgttttaaaatggactatcatatgcttaccgtaacttgaaagtatttcgatttcttggctttatatatcttgtggaaaggacgaaacaccgcgggaggactggggaatggtgttttagagctagaaatagcaagttaaaataaggctagtccgttatcaacttgaaaaagtggcaccgagtcggtgccggcacagctatattgcaccattccccagtcctttttttcgaagatctactgcgaaagcagcggtacagacagttagattt

SEQ ID NO: 1750 - DNA, 271 bp, Artificial Sequence
  Synthetic
tacgtgacgtagaaagtaataatttcttgggtagtttgcagttttaaaattatgttttaaaatggactatcatatgcttaccgtaacttgaaagtatttcgatttcttggctttatatatcttgtggaaaggacgaaacaccgactccgggaggactggggaagttttagagctagaaatagcaagttaaaataaggctagtccgttatcaacttgaaaaagtggcaccgagtcggtgcgctatattgcaccattccccagtccttttttt

SEQ ID NO: 1751 - DNA, 277 bp, Artificial Sequence
  Synthetic
tacgtgacgtagaaagtaataatttcttgggtagtttgcagttttaaaattatgttttaaaatggactatcatatgcttaccgtaacttgaaagtatttcgatttcttggctttatatatcttgtggaaaggacgaaacaccgactccgggaggactggggaagttttagagctagaaatagcaagttaaaataaggctagtccgttatcaacttgaaaaagtggcaccgagtcggtgcgctatattgcaccattccccagtcctcccggatttttt

SEQ ID NO: 1752 - DNA, 274 bp, Artificial Sequence
  Synthetic
tacgtgacgtagaaagtaataatttcttgggtagtttgcagttttaaaattatgttttaaaatggactatcatatgcttaccgtaacttgaaagtatttcgatttcttggctttatatatcttgtggaaaggacgaaacaccgactccgggaggactggggaagttttagagctagaaatagcaagttaaaataaggctagtccgttatcaacttgaaaaagtggcaccgagtcggtgcacagctatattgcaccattccccagtccttttttt

SEQ ID NO: 1753 - DNA, 280 bp, Artificial Sequence
  Synthetic
tacgtgacgtagaaagtaataatttcttgggtagtttgcagttttaaaattatgttttaaaatggactatcatatgcttaccgtaacttgaaagtatttcgatttcttggctttatatatcttgtggaaaggacgaaacaccgactccgggaggactggggaagttttagagctagaaatagcaagttaaaataaggctagtccgttatcaacttgaaaaagtggcaccgagtcggtgcacagctatattgcaccattccccagtcctcccggatttttt

SEQ ID NO: 1754 - DNA, 276 bp, Artificial Sequence
  Synthetic
tacgtgacgtagaaagtaataatttcttgggtagtttgcagttttaaaattatgttttaaaatggactatcatatgcttaccgtaacttgaaagtatttcgatttcttggctttatatatcttgtggaaaggacgaaacaccgactccgggaggactggggaagttttagagctagaaatagcaagttaaaataaggctagtccgttatcaacttgaaaaagtggcaccgagtcggtgcgcacagctatattgcaccattccccagtccttttttt

SEQ ID NO: 1755 - DNA, 282 bp, Artificial Sequence
  Synthetic
tacgtgacgtagaaagtaataatttcttgggtagtttgcagttttaaaattatgttttaaaatggactatcatatgcttaccgtaacttgaaagtatttcgatttcttggctttatatatcttgtggaaaggacgaaacaccgactccgggaggactggggaagttttagagctagaaatagcaagttaaaataaggctagtccgttatcaacttgaaaaagtggcaccgagtcggtgcgcacagctatattgcaccattccccagtcctcccggatttttt

SEQ ID NO: 1756 - DNA, 15 bp, Artificial Sequence
  Synthetic
aaaaaaaaaaaaaaa

SEQ ID NO: 1757 - DNA, 12 bp, Artificial Sequence
  Synthetic
gggggggggggg

SEQ ID NO: 1758 - DNA, 12 bp, Artificial Sequence
  Synthetic
cccccccccccc

SEQ ID NO: 1759 - DNA, 14 bp, Artificial Sequence
  Synthetic
aacgaacaccgcag

SEQ ID NO: 1760 - DNA, 76 bp, Artificial Sequence
  Synthetic
  misc_feature (16)..(17): n is a, c, g, t or u
  misc_feature (39)..(39): n is a, c, g, t or u
  misc_feature (55)..(55): n is a, c, g, t or u
gcggauuuagcucagnngggagagcgccagacugaayancuggagguccugugtncgauccacagaauucgcacca

SEQ ID NO: 1761 - DNA, 188 bp, Artificial Sequence
  Synthetic
  misc_feature (99)..(123): n is a, c, g, t or u
  misc_feature (137)..(138): n is a, c, g, t or u
  misc_feature (158)..(158): n is a, c, g, t or u
  misc_feature (174)..(174): n is a, c, g, t or u
gaaggcaauaaugcuaauuacaguuuuagagcuagaaauagcaaguuaaaauaaggcuaguccguuaucaacuugaaaaaguggcaccgagucggugcnnnnnnnnnnnnnnnnnnnnnnnnnucuuagcucagggnngagagcgccagacuaggyancuggagguccugugtncgauccacaguuuu

SEQ ID NO: 1762 - DNA, 167 bp, Artificial Sequence
  Synthetic
ggcccagactgagcacgtgagttttagagctagaaatagcaagttaaaataaggctagtccgttatcaacttgaaaaagtggcaccgagtcggtgctggaggaagcagggcttcctttcctctgccatcacttatcgtcgtcatccttgtaatccgtgctcagtctg

SEQ ID NO: 1763 - DNA, 94 bp, Artificial Sequence
  Synthetic
aaaataaggctagtccgttatcaacttgaaaaagtggcaccgagtcggtgctggaggaagcagggcttcctttcctctgccatcacttatcgtc

SEQ ID NO: 1764 - DNA, 97 bp, Artificial Sequence
  Synthetic
tgaaaaagtggcaccgagtcggtgctggaggaagcagggcttcctttcctctgccatcacttatcgtcgtcatccttgtaatccgtgctcagtctgt

SEQ ID NO: 1765-1770 - skipped (6 entries)

SEQ ID NO: 1771 - DNA, 6 bp, Artificial Sequence
  Synthetic
tttttt

SEQ ID NO: 1772 - DNA, 8 bp, Artificial Sequence
  Synthetic
gcctgcac

SEQ ID NO: 1773 - DNA, 2 bp, Artificial Sequence
  Synthetic
ct

SEQ ID NO: 1774 - DNA, 3 bp, Artificial Sequence
  Synthetic
tga

SEQ ID NO: 1775 - DNA, 2 bp, Artificial Sequence
  Synthetic
tg

SEQ ID NO: 1776 - DNA, 4 bp, Artificial Sequence
  Synthetic
taga

SEQ ID NO: 1777 - DNA, 1 bp, Artificial Sequence
  Synthetic
c

SEQ ID NO: 1778 - DNA, 8 bp, Artificial Sequence
  Synthetic
acaatctc

SEQ ID NO: 1779 - DNA, 8 bp, Artificial Sequence
  Synthetic
tagacaca

SEQ ID NO: 1780 - DNA, 8 bp, Artificial Sequence
  Synthetic
aatccttt

SEQ ID NO: 1781 - DNA, 8 bp, Artificial Sequence
  Synthetic
aataagac

SEQ ID NO: 1782 - DNA, 8 bp, Artificial Sequence
  Synthetic
gaattcga

SEQ ID NO: 1783 - DNA, 8 bp, Artificial Sequence
  Synthetic
aagagaca

SEQ ID NO: 1784 - DNA, 8 bp, Artificial Sequence
  Synthetic
ataaattg

SEQ ID NO: 1785 - DNA, 8 bp, Artificial Sequence
  Synthetic
cactatac

SEQ ID NO: 1786 - DNA, 8 bp, Artificial Sequence
  Synthetic
tttaaatc

SEQ ID NO: 1787 - DNA, 8 bp, Artificial Sequence
  Synthetic
tcctaatt

SEQ ID NO: 1788 - DNA, 8 bp, Artificial Sequence
  Synthetic
atagaatg

SEQ ID NO: 1789 - DNA, 8 bp, Artificial Sequence
  Synthetic
aatcggtc

SEQ ID NO: 1790 - DNA, 8 bp, Artificial Sequence
  Synthetic
taaaaaaa

SEQ ID NO: 1791 - DNA, 8 bp, Artificial Sequence
  Synthetic
tgaaaagg

SEQ ID NO: 1792 - DNA, 8 bp, Artificial Sequence
  Synthetic
tgaatgac

SEQ ID NO: 1793 - DNA, 8 bp, Artificial Sequence
  Synthetic
taacgagc

SEQ ID NO: 1794 - DNA, 8 bp, Artificial Sequence
  Synthetic
taaaacgg

SEQ ID NO: 1795 - DNA, 8 bp, Artificial Sequence
  Synthetic
agtcgtac

SEQ ID NO: 1796 - DNA, 8 bp, Artificial Sequence
  Synthetic
gttagcca

SEQ ID NO: 1797 - DNA, 8 bp, Artificial Sequence
  Synthetic
gatcgact

SEQ ID NO: 1798 - DNA, 8 bp, Artificial Sequence
  Synthetic
agtcgcgc

SEQ ID NO: 1799 - DNA, 8 bp, Artificial Sequence
  Synthetic
attaccgt

SEQ ID NO: 1800 - DNA, 8 bp, Artificial Sequence
  Synthetic
tgctagaa

SEQ ID NO: 1801 - DNA, 8 bp, Artificial Sequence
  Synthetic
tgggccaa

SEQ ID NO: 1802 - DNA, 8 bp, Artificial Sequence
  Synthetic
cggtgccc

SEQ ID NO: 1803 - DNA, 8 bp, Artificial Sequence
  Synthetic
accctggg

SEQ ID NO: 1804 - DNA, 8 bp, Artificial Sequence
  Synthetic
gtgccagc

SEQ ID NO: 1805 - DNA, 8 bp, Artificial Sequence
  Synthetic
ccccgacg

SEQ ID NO: 1806 - DNA, 8 bp, Artificial Sequence
  Synthetic
ccccgcta

SEQ ID NO: 1807 - DNA, 8 bp, Artificial Sequence
  Synthetic
cccactat

SEQ ID NO: 1808 - DNA, 8 bp, Artificial Sequence
  Synthetic
ccccacac

SEQ ID NO: 1809 - DNA, 8 bp, Artificial Sequence
  Synthetic
cccacacg

SEQ ID NO: 1810 - DNA, 8 bp, Artificial Sequence
  Synthetic
tgacagat

SEQ ID NO: 1811 - DNA, 8 bp, Artificial Sequence
  Synthetic
acgacaaa

SEQ ID NO: 1812 - DNA, 8 bp, Artificial Sequence
  Synthetic
acgtgaca

SEQ ID NO: 1813 - DNA, 8 bp, Artificial Sequence
  Synthetic
tgacggac

SEQ ID NO: 1814 - DNA, 8 bp, Artificial Sequence
  Synthetic
acgggaat

SEQ ID NO: 1815 - DNA, 8 bp, Artificial Sequence
  Synthetic
tcgttaca

SEQ ID NO: 1816 - DNA, 8 bp, Artificial Sequence
  Synthetic
atcattgc

SEQ ID NO: 1817 - DNA, 8 bp, Artificial Sequence
  Synthetic
cattgcgc

SEQ ID NO: 1818 - DNA, 8 bp, Artificial Sequence
  Synthetic
cattgcat

SEQ ID NO: 1819 - DNA, 8 bp, Artificial Sequence
  Synthetic
aagtaaat

SEQ ID NO: 1820 - DNA, 8 bp, Artificial Sequence
  Synthetic
aactagtc

SEQ ID NO: 1821 - DNA, 8 bp, Artificial Sequence
  Synthetic
ttaaatac

SEQ ID NO: 1822 - DNA, 8 bp, Artificial Sequence
  Synthetic
tttaaaga

SEQ ID NO: 1823 - DNA, 8 bp, Artificial Sequence
  Synthetic
cctaaata

SEQ ID NO: 1824 - DNA, 8 bp, Artificial Sequence
  Synthetic
cctaaatt

SEQ ID NO: 1825 - DNA, 8 bp, Artificial Sequence
  Synthetic
aaaccaac

SEQ ID NO: 1826 - DNA, 8 bp, Artificial Sequence
  Synthetic
aaacactt

SEQ ID NO: 1827 - RNA, 8 nt, Artificial Sequence
  Synthetic
ucucucuc

SEQ ID NO: 1828 - RNA, 8 nt, Artificial Sequence
  Synthetic
ucaucucu

SEQ ID NO: 1829 - RNA, 8 nt, Artificial Sequence
  Synthetic
ccucuucu

SEQ ID NO: 1830 - RNA, 8 nt, Artificial Sequence
  Synthetic
aacucucu

SEQ ID NO: 1831 - RNA, 8 nt, Artificial Sequence
  Synthetic
aacaaucu

SEQ ID NO: 1832 - DNA, 8 bp, Artificial Sequence
  Synthetic
ctaaatac

SEQ ID NO: 1833 - DNA, 8 bp, Artificial Sequence
  Synthetic
ccctatac

SEQ ID NO: 1834 - DNA, 8 bp, Artificial Sequence
  Synthetic
cactacat

SEQ ID NO: 1835 - DNA, 8 bp, Artificial Sequence
  Synthetic
caccctcc

SEQ ID NO: 1836 - DNA, 8 bp, Artificial Sequence
  Synthetic
ccctccat

SEQ ID NO: 1837 - DNA, 8 bp, Artificial Sequence
  Synthetic
cctaatcc

SEQ ID NO: 1838 - DNA, 8 bp, Artificial Sequence
  Synthetic
accttagc

SEQ ID NO: 1839 - DNA, 8 bp, Artificial Sequence
  Synthetic
actaacct

SEQ ID NO: 1840 - DNA, 8 bp, Artificial Sequence
  Synthetic
actaacca

SEQ ID NO: 1841 - DNA, 8 bp, Artificial Sequence
  Synthetic
cacaatgc

SEQ ID NO: 1842 - DNA, 8 bp, Artificial Sequence
  Synthetic
caaataag

SEQ ID NO: 1843 - DNA, 8 bp, Artificial Sequence
  Synthetic
aaataaat

SEQ ID NO: 1844 - DNA, 8 bp, Artificial Sequence
  Synthetic
aaaccaat

SEQ ID NO: 1845 - DNA, 8 bp, Artificial Sequence
  Synthetic
aattccct

SEQ ID NO: 1846 - DNA, 8 bp, Artificial Sequence
  Synthetic
aagaaaga

SEQ ID NO: 1847 - DNA, 8 bp, Artificial Sequence
  Synthetic
tatattca

SEQ ID NO: 1848 - DNA, 8 bp, Artificial Sequence
  Synthetic
aatatcaa

SEQ ID NO: 1849 - DNA, 8 bp, Artificial Sequence
  Synthetic
ttaaagac

SEQ ID NO: 1850 - DNA, 8 bp, Artificial Sequence
  Synthetic
cgaaattg

SEQ ID NO: 1851 - DNA, 8 bp, Artificial Sequence
  Synthetic
accttatt

SEQ ID NO: 1852 - DNA, 8 bp, Artificial Sequence
  Synthetic
acccgccc

SEQ ID NO: 1853 - DNA, 8 bp, Artificial Sequence
  Synthetic
tttaaagc

SEQ ID NO: 1854 - DNA, 8 bp, Artificial Sequence
  Synthetic
tggagaac

SEQ ID NO: 1855 - DNA, 8 bp, Artificial Sequence
  Synthetic
gaaagaca

SEQ ID NO: 1856 - DNA, 8 bp, Artificial Sequence
  Synthetic
gagaaaca

SEQ ID NO: 1857 - DNA, 8 bp, Artificial Sequence
  Synthetic
attaatta

SEQ ID NO: 1858 - DNA, 8 bp, Artificial Sequence
  Synthetic
aaattcta

SEQ ID NO: 1859 - DNA, 8 bp, Artificial Sequence
  Synthetic
aaagattt

SEQ ID NO: 1860 - DNA, 8 bp, Artificial Sequence
  Synthetic
aagataaa

SEQ ID NO: 1861 - DNA, 4 bp, Artificial Sequence
  Synthetic
tttt

SEQ ID NO: 1862 - DNA, 182 bp, Artificial Sequence
  Synthetic
gtgagagccaagggcttggagttttagagctagaaatagcaagttaaaataaggctagtccgttatcaacttgaaaaagtggcaccgagtcggtgccccttgccctatgctcatgcttccatctaagcccttggctcaaagttcccgcggttctatctagttacgcgttaaaccaactagaa

SEQ ID NO: 1863 - DNA, 181 bp, Artificial Sequence
  Synthetic
gtgagagccaagggcttggagttttagagctagaaatagcaagttaaaataaggctagtccgttatcaacttgaaaaagtggcaccgagtcggtgcccttgccctatgctcatgcttccatctaagcccttggctcaaagaaaccgcggttctatctagttacgcgttaaaccaactagaa

SEQ ID NO: 1864 - DNA, 180 bp, Artificial Sequence
  Synthetic
gtgagagccaagggcttggagttttagagctagaaatagcaagttaaaataaggctagtccgttatcaacttgaaaaagtggcaccgagtcggtgccttgccctatgctcatgcttccatctaagcccttggctcaaagtttccgcggttctatctagttacgcgttaaaccaactagaa

SEQ ID NO: 1865 - DNA, 179 bp, Artificial Sequence
  Synthetic
gtgagagccaagggcttggagttttagagctagaaatagcaagttaaaataaggctagtccgttatcaacttgaaaaagtggcaccgagtcggtgcttgccctatgctcatgcttccatctaagcccttggctcaaagtttccgcggttctatctagttacgcgttaaaccaactagaa

SEQ ID NO: 1866 - DNA, 178 bp, Artificial Sequence
  Synthetic
gtgagagccaagggcttggagttttagagctagaaatagcaagttaaaataaggctagtccgttatcaacttgaaaaagtggcaccgagtcggtgctgccctatgctcatgcttccatctaagcccttggctcaaagtttccgcggttctatctagttacgcgttaaaccaactagaa

SEQ ID NO: 1867 - DNA, 177 bp, Artificial Sequence
  Synthetic
gtgagagccaagggcttggagttttagagctagaaatagcaagttaaaataaggctagtccgttatcaacttgaaaaagtggcaccgagtcggtgcgccctatgctcatgcttccatctaagcccttggctcaaagtttccgcggttctatctagttacgcgttaaaccaactagaa

SEQ ID NO: 1868 - DNA, 176 bp, Artificial Sequence
  Synthetic
gtgagagccaagggcttggagttttagagctagaaatagcaagttaaaataaggctagtccgttatcaacttgaaaaagtggcaccgagtcggtgcccctatgctcatgcttccatctaagcccttggctcaaagtttccgcggttctatctagttacgcgttaaaccaactagaa

SEQ ID NO: 1869 - DNA, 175 bp, Artificial Sequence
  Synthetic
gtgagagccaagggcttggagttttagagctagaaatagcaagttaaaataaggctagtccgttatcaacttgaaaaagtggcaccgagtcggtgccctatgctcatgcttccatctaagcccttggctcaagtaaaccgcggttctatctagttacgcgttaaaccaactagaa

SEQ ID NO: 1870 - DNA, 174 bp, Artificial Sequence
  Synthetic
gtgagagccaagggcttggagttttagagctagaaatagcaagttaaaataaggctagtccgttatcaacttgaaaaagtggcaccgagtcggtgcctatgctcatgcttccatctaagcccttggctcaaagttcccgcggttctatctagttacgcgttaaaccaactagaa

SEQ ID NO: 1871 - DNA, 173 bp, Artificial Sequence
  Synthetic
gtgagagccaagggcttggagttttagagctagaaatagcaagttaaaataaggctagtccgttatcaacttgaaaaagtggcaccgagtcggtgctatgctcatgcttccatctaagcccttggctcaaagttcccgcggttctatctagttacgcgttaaaccaactagaa

SEQ ID NO: 1872 - DNA, 172 bp, Artificial Sequence
  Synthetic
gtgagagccaagggcttggagttttagagctagaaatagcaagttaaaataaggctagtccgttatcaacttgaaaaagtggcaccgagtcggtgcatgctcatgcttccatctaagcccttggctcaaagtttacgcggttctatctagttacgcgttaaaccaactagaa

SEQ ID NO: 1873 - DNA, 171 bp, Artificial Sequence
  Synthetic
gtgagagccaagggcttggagttttagagctagaaatagcaagttaaaataaggctagtccgttatcaacttgaaaaagtggcaccgagtcggtgctgctcatgcttccatctaagcccttggctcaaagttcccgcggttctatctagttacgcgttaaaccaactagaa

SEQ ID NO: 1874 - DNA, 182 bp, Artificial Sequence
  Synthetic
gtgagagccaagggcttggagttttagagctagaaatagcaagttaaaataaggctagtccgttatcaacttgaaaaagtggcaccgagtcggtgcttgccctatgctcatgcttccatctaagcccttggctctcaaataataacgcggttctatctagttacgcgttaaaccaactagaa

SEQ ID NO: 1875 - DNA, 181 bp, Artificial Sequence
  Synthetic
gtgagagccaagggcttggagttttagagctagaaatagcaagttaaaataaggctagtccgttatcaacttgaaaaagtggcaccgagtcggtgcttgccctatgctcatgcttccatctaagcccttggctctctaaataaacgcggttctatctagttacgcgttaaaccaactagaa

SEQ ID NO: 1876 - DNA, 180 bp, Artificial Sequence
  Synthetic
gtgagagccaagggcttggagttttagagctagaaatagcaagttaaaataaggctagtccgttatcaacttgaaaaagtggcaccgagtcggtgcttgccctatgctcatgcttccatctaagcccttggctctaaagttcgcgcggttctatctagttacgcgttaaaccaactagaa

SEQ ID NO: 1877 - DNA, 178 bp, Artificial Sequence
  Synthetic
gtgagagccaagggcttggagttttagagctagaaatagcaagttaaaataaggctagtccgttatcaacttgaaaaagtggcaccgagtcggtgcttgccctatgctcatgcttccatctaagcccttggctaaagaaatcgcggttctatctagttacgcgttaaaccaactagaa

SEQ ID NO: 1878 - DNA, 177 bp, Artificial Sequence
  Synthetic
gtgagagccaagggcttggagttttagagctagaaatagcaagttaaaataaggctagtccgttatcaacttgaaaaagtggcaccgagtcggtgcttgccctatgctcatgcttccatctaagcccttggcagaaattccgcggttctatctagttacgcgttaaaccaactagaa

SEQ ID NO: 1879 - DNA, 176 bp, Artificial Sequence
  Synthetic
gtgagagccaagggcttggagttttagagctagaaatagcaagttaaaataaggctagtccgttatcaacttgaaaaagtggcaccgagtcggtgcttgccctatgctcatgcttccatctaagcccttgggaaagaagcgcggttctatctagttacgcgttaaaccaactagaa

SEQ ID NO: 1880 - DNA, 175 bp, Artificial Sequence
  Synthetic
gtgagagccaagggcttggagttttagagctagaaatagcaagttaaaataaggctagtccgttatcaacttgaaaaagtggcaccgagtcggtgcttgccctatgctcatgcttccatctaagcccttgaaagatttcgcggttctatctagttacgcgttaaaccaactagaa

SEQ ID NO: 1881 - DNA, 174 bp, Artificial Sequence
  Synthetic
gtgagagccaagggcttggagttttagagctagaaatagcaagttaaaataaggctagtccgttatcaacttgaaaaagtggcaccgagtcggtgcttgccctatgctcatgcttccatctaagcccttaaagaaatcgcggttctatctagttacgcgttaaaccaactagaa

SEQ ID NO: 1882 - DNA, 180 bp, Artificial Sequence
  Synthetic
gaattgtctggacgtggagagttttagagctagaaatagcaagttaaaataaggctagtccgttatcaacttgaaaaagtggcaccgagtcggtgcttggtagcttctacagaatgccatcgccacgtccagacataaatagtcgcggttctatctagttacgcgttaaaccaactagaa

SEQ ID NO: 1883 - DNA, 179 bp, Artificial Sequence
  Synthetic
gaattgtctggacgtggagagttttagagctagaaatagcaagttaaaataaggctagtccgttatcaacttgaaaaagtggcaccgagtcggtgctggtagcttctacagaatgccatcgccacgtccagacacaaataaacgcggttctatctagttacgcgttaaaccaactagaa

SEQ ID NO: 1884 - DNA, 178 bp, Artificial Sequence
  Synthetic
gaattgtctggacgtggagagttttagagctagaaatagcaagttaaaataaggctagtccgttatcaacttgaaaaagtggcaccgagtcggtgcggtagcttctacagaatgccatcgccacgtccagacataaataagcgcggttctatctagttacgcgttaaaccaactagaa

SEQ ID NO: 1885 - DNA, 177 bp, Artificial Sequence
  Synthetic
gaattgtctggacgtggagagttttagagctagaaatagcaagttaaaataaggctagtccgttatcaacttgaaaaagtggcaccgagtcggtgcgtagcttctacagaatgccatcgccacgtccagacacaaaccatcgcggttctatctagttacgcgttaaaccaactagaa

SEQ ID NO: 1886 - DNA, 176 bp, Artificial Sequence
  Synthetic
gaattgtctggacgtggagagttttagagctagaaatagcaagttaaaataaggctagtccgttatcaacttgaaaaagtggcaccgagtcggtgctagcttctacagaatgccatcgccacgtccagacacaaaccagcgcggttctatctagttacgcgttaaaccaactagaa

SEQ ID NO: 1887 - DNA, 175 bp, Artificial Sequence
  Synthetic
gaattgtctggacgtggagagttttagagctagaaatagcaagttaaaataaggctagtccgttatcaacttgaaaaagtggcaccgagtcggtgcagcttctacagaatgccatcgccacgtccagacacaaataagcgcggttctatctagttacgcgttaaaccaactagaa

SEQ ID NO: 1888 - DNA, 174 bp, Artificial Sequence
  Synthetic
gaattgtctggacgtggagagttttagagctagaaatagcaagttaaaataaggctagtccgttatcaacttgaaaaagtggcaccgagtcggtgcgcttctacagaatgccatcgccacgtccagacacccaaatccgcggttctatctagttacgcgttaaaccaactagaa

SEQ ID NO: 1889 - DNA, 173 bp, Artificial Sequence
  Synthetic
gaattgtctggacgtggagagttttagagctagaaatagcaagttaaaataaggctagtccgttatcaacttgaaaaagtggcaccgagtcggtgccttctacagaatgccatcgccacgtccagacacaaacaaccgcggttctatctagttacgcgttaaaccaactagaa

SEQ ID NO: 1890 - DNA, 172 bp, Artificial Sequence
  Synthetic
gaattgtctggacgtggagagttttagagctagaaatagcaagttaaaataaggctagtccgttatcaacttgaaaaagtggcaccgagtcggtgcttctacagaatgccatcgccacgtccagacacaaacaagcgcggttctatctagttacgcgttaaaccaactagaa

SEQ ID NO: 1891 - DNA, 171 bp, Artificial Sequence
  Synthetic
gaattgtctggacgtggagagttttagagctagaaatagcaagttaaaataaggctagtccgttatcaacttgaaaaagtggcaccgagtcggtgctttacagagtgccatctccacgtccagacataaataagcgcggttctatctagttacgcgttaaaccaactagaa

SEQ ID NO: 1892 - DNA, 170 bp, Artificial Sequence
  Synthetic
gaattgtctggacgtggagagttttagagctagaaatagcaagttaaaataaggctagtccgttatcaacttgaaaaagtggcaccgagtcggtgcttacagagtgccatctccacgtccagacataaacccgcgcggttctatctagttacgcgttaaaccaactagaa

SEQ ID NO: 1893 - DNA, 169 bp, Artificial Sequence
  Synthetic
gaattgtctggacgtggagagttttagagctagaaatagcaagttaaaataaggctagtccgttatcaacttgaaaaagtggcaccgagtcggtgctacagagtgccatctccacgtccagacataagaatacgcggttctatctagttacgcgttaaaccaactagaa

SEQ ID NO: 1894 - DNA, 181 bp, Artificial Sequence
  Synthetic
gaattgtctggacgtggagagttttagagctagaaatagcaagttaaaataaggctagtccgttatcaacttgaaaaagtggcaccgagtcggtgcggtagcttctacagaatgccatcgccacgtccagacaattaaacaatacgcggttctatctagttacgcgttaaaccaactagaa

SEQ ID NO: 1895 - DNA, 180 bp, Artificial Sequence
  Synthetic
gaattgtctggacgtggagagttttagagctagaaatagcaagttaaaataaggctagtccgttatcaacttgaaaaagtggcaccgagtcggtgcggtagcttctacagaatgccatcgccacgtccagacaataaatacagcgcggttctatctagttacgcgttaaaccaactagaa

SEQ ID NO: 1896 - DNA, 179 bp, Artificial Sequence
  Synthetic
gaattgtctggacgtggagagttttagagctagaaatagcaagttaaaataaggctagtccgttatcaacttgaaaaagtggcaccgagtcggtgcggtagcttctacagaatgccatcgccacgtccagacaacaaacaaacgcggttctatctagttacgcgttaaaccaactagaa

SEQ ID NO: 1897 - DNA, 177 bp, Artificial Sequence
  Synthetic
gaattgtctggacgtggagagttttagagctagaaatagcaagttaaaataaggctagtccgttatcaacttgaaaaagtggcaccgagtcggtgcggtagcttctacagaatgccatcgccacgtccagacctaagaaacgcggttctatctagttacgcgttaaaccaactagaa

SEQ ID NO: 1898 - DNA, 176 bp, Artificial Sequence
  Synthetic
gaattgtctggacgtggagagttttagagctagaaatagcaagttaaaataaggctagtccgttatcaacttgaaaaagtggcaccgagtcggtgcggtagcttctacagaatgccatcgccacgtccagaagcctaaacgcggttctatctagttacgcgttaaaccaactagaa

SEQ ID NO: 1899 - DNA, 175 bp, Artificial Sequence
  Synthetic
gaattgtctggacgtggagagttttagagctagaaatagcaagttaaaataaggctagtccgttatcaacttgaaaaagtggcaccgagtcggtgcggtagcttctacagaatgccatcgccacgtccaggtgccactcgcggttctatctagttacgcgttaaaccaactagaa

SEQ ID NO: 1900 - DNA, 174 bp, Artificial Sequence
  Synthetic
gaattgtctggacgtggagagttttagagctagaaatagcaagttaaaataaggctagtccgttatcaacttgaaaaagtggcaccgagtcggtgcggtagcttctacagaatgccatcgccacgtccacctcctggcgcggttctatctagttacgcgttaaaccaactagaa

SEQ ID NO: 1901 - DNA, 165 bp, Artificial Sequence
  Synthetic
gaattgtctggacgtggagagttttagagctagaaatagcaagttaaaataaggctagtccgttatcaacttgaaaaagtggcaccgagtcggtgcggtagcttctacagaatgccatcgaacaccatcgcggttctatctagttacgcgttaaaccaactagaa

SEQ ID NO: 1902 - DNA, 174 bp, Artificial Sequence
  Synthetic
gtcggcatagctatattgcacgttttagagctagaaatagcaagttaaaataaggctagtccgttatcaacttgaaaaagtggcaccgagtcggtgcagaggactggggaatagtatcaatatagctataataaatccgcggttctatctagttacgcgttaaaccaactagaa

SEQ ID NO: 1903 - DNA, 173 bp, Artificial Sequence
  Synthetic
gtcggcatagctatattgcacgttttagagctagaaatagcaagttaaaataaggctagtccgttatcaacttgaaaaagtggcaccgagtcggtgcgaggactggggaatagtatcaatatagctataataatttcgcggttctatctagttacgcgttaaaccaactagaa

SEQ ID NO: 1904 - DNA, 172 bp, Artificial Sequence
  Synthetic
gtcggcatagctatattgcacgttttagagctagaaatagcaagttaaaataaggctagtccgttatcaacttgaaaaagtggcaccgagtcggtgcaggactggggaatagtatcaatatagctataaataaaccgcggttctatctagttacgcgttaaaccaactagaa

SEQ ID NO: 1905 - DNA, 171 bp, Artificial Sequence
  Synthetic
gtcggcatagctatattgcacgttttagagctagaaatagcaagttaaaataaggctagtccgttatcaacttgaaaaagtggcaccgagtcggtgcggactggggaatagtatcaatatagctataaataaaccgcggttctatctagttacgcgttaaaccaactagaa

SEQ ID NO: 1906 - DNA, 170 bp, Artificial Sequence
  Synthetic
gtcggcatagctatattgcacgttttagagctagaaatagcaagttaaaataaggctagtccgttatcaacttgaaaaagtggcaccgagtcggtgcgactggggaatagtatcaatatagctataaataaatcgcggttctatctagttacgcgttaaaccaactagaa

SEQ ID NO: 1907 - DNA, 169 bp, Artificial Sequence
  Synthetic
gtcggcatagctatattgcacgttttagagctagaaatagcaagttaaaataaggctagtccgttatcaacttgaaaaagtggcaccgagtcggtgcactggggaatagtatcaatatagctataataaattcgcggttctatctagttacgcgttaaaccaactagaa

SEQ ID NO: 1908 - DNA, 168 bp, Artificial Sequence
  Synthetic
gtcggcatagctatattgcacgttttagagctagaaatagcaagttaaaataaggctagtccgttatcaacttgaaaaagtggcaccgagtcggtgcctggggaatagtatcaatatagctataaataatacgcggttctatctagttacgcgttaaaccaactagaa

SEQ ID NO: 1909 - DNA, 167 bp, Artificial Sequence
  Synthetic
gtcggcatagctatattgcacgttttagagctagaaatagcaagttaaaataaggctagtccgttatcaacttgaaaaagtggcaccgagtcggtgctggggaatagtatcaatatagctataataaatacgcggttctatctagttacgcgttaaaccaactagaa

SEQ ID NO: 1910 - DNA, 166 bp, Artificial Sequence
  Synthetic
gtcggcatagctatattgcacgttttagagctagaaatagcaagttaaaataaggctagtccgttatcaacttgaaaaagtggcaccgagtcggtgcggggaatagtatcaatatagctataaataaaccgcggttctatctagttacgcgttaaaccaactagaa

SEQ ID NO: 1911 - DNA, 165 bp, Artificial Sequence
  Synthetic
gtcggcatagctatattgcacgttttagagctagaaatagcaagttaaaataaggctagtccgttatcaacttgaaaaagtggcaccgagtcggtgcgggaatagtatcaatatagctataaataaaccgcggttctatctagttacgcgttaaaccaactagaa

SEQ ID NO: 1912 - DNA, 164 bp, Artificial Sequence
  Synthetic
gtcggcatagctatattgcacgttttagagctagaaatagcaagttaaaataaggctagtccgttatcaacttgaaaaagtggcaccgagtcggtgcggaatagtatcaatatagctataaataatacgcggttctatctagttacgcgttaaaccaactagaa

SEQ ID NO: 1913 - DNA, 163 bp, Artificial Sequence
  Synthetic
gtcggcatagctatattgcacgttttagagctagaaatagcaagttaaaataaggctagtccgttatcaacttgaaaaagtggcaccgagtcggtgcgaatagtatcaatatagctataaataaaccgcggttctatctagttacgcgttaaaccaactagaa

SEQ ID NO: 1914 - DNA, 172 bp, Artificial Sequence
  Synthetic
gtcggcatagctatattgcacgttttagagctagaaatagcaagttaaaataaggctagtccgttatcaacttgaaaaagtggcaccgagtcggtgcactggggaatagtatcaatatagctatgccatttataacgcggttctatctagttacgcgttaaaccaactagaa

SEQ ID NO: 1915 - DNA, 171 bp, Artificial Sequence
  Synthetic
gtcggcatagctatattgcacgttttagagctagaaatagcaagttaaaataaggctagtccgttatcaacttgaaaaagtggcaccgagtcggtgcactggggaatagtatcaatatagctatgcataaatctcgcggttctatctagttacgcgttaaaccaactagaa

SEQ ID NO: 1916 - DNA, 170 bp, Artificial Sequence
  Synthetic
gtcggcatagctatattgcacgttttagagctagaaatagcaagttaaaataaggctagtccgttatcaacttgaaaaagtggcaccgagtcggtgcactggggaatagtatcaatatagctatgaataaatccgcggttctatctagttacgcgttaaaccaactagaa

SEQ ID NO: 1917 - DNA, 168 bp, Artificial Sequence
  Synthetic
gtcggcatagctatattgcacgttttagagctagaaatagcaagttaaaataaggctagtccgttatcaacttgaaaaagtggcaccgagtcggtgcactggggaatagtatcaatatagctaataaataacgcggttctatctagttacgcgttaaaccaactagaa

SEQ ID NO: 1918 - DNA, 167 bp, Artificial Sequence
  Synthetic
gtcggcatagctatattgcacgttttagagctagaaatagcaagttaaaataaggctagtccgttatcaacttgaaaaagtggcaccgagtcggtgcactggggaatagtatcaatatagctctagaacccgcggttctatctagttacgcgttaaaccaactagaa

SEQ ID NO: 1919 - DNA, 166 bp, Artificial Sequence
  Synthetic
gtcggcatagctatattgcacgttttagagctagaaatagcaagttaaaataaggctagtccgttatcaacttgaaaaagtggcaccgagtcggtgcactggggaatagtatcaatatagcaaataaatcgcggttctatctagttacgcgttaaaccaactagaa

SEQ ID NO: 1920 - DNA, 165 bp, Artificial Sequence
  Synthetic
gtcggcatagctatattgcacgttttagagctagaaatagcaagttaaaataaggctagtccgttatcaacttgaaaaagtggcaccgagtcggtgcactggggaatagtatcaatataggacttagccgcggttctatctagttacgcgttaaaccaactagaa

SEQ ID NO: 1921 - DNA, 96 bp, Artificial Sequence
  Synthetic
gaggactggggaatagtatcgttttagagctagaaatagcaagttaaaataaggctagtccgttatcaacttgaaaaagtggcaccgagtcggtgc

SEQ ID NO: 1922 - DNA, 175 bp, Artificial Sequence
  Synthetic
gagtcggcatagctatattggttttagagctagaaatagcaagttaaaataaggctagtccgttatcaacttgaaaaagtggcaccgagtcggtgcaggactggggaattgtgtctatatagctatgccgtgaaagaacgcggttctatctagttacgcgttaaaccaactagaa

SEQ ID NO: 1923 - DNA, 174 bp, Artificial Sequence
  Synthetic
gagtcggcatagctatattggttttagagctagaaatagcaagttaaaataaggctagtccgttatcaacttgaaaaagtggcaccgagtcggtgcggactggggaattgtgtctatatagctatgccgtgggaaaccgcggttctatctagttacgcgttaaaccaactagaa

SEQ ID NO: 1924 - DNA, 173 bp, Artificial Sequence
  Synthetic
gagtcggcatagctatattggttttagagctagaaatagcaagttaaaataaggctagtccgttatcaacttgaaaaagtggcaccgagtcggtgcgactggggaattgtgtctatatagctatgccgtggaaagacgcggttctatctagttacgcgttaaaccaactagaa

SEQ ID NO: 1925 - DNA, 172 bp, Artificial Sequence
  Synthetic
gagtcggcatagctatattggttttagagctagaaatagcaagttaaaataaggctagtccgttatcaacttgaaaaagtggcaccgagtcggtgcactggggaattgtgtctatatagctatgccgtgaaagaacgcggttctatctagttacgcgttaaaccaactagaa

SEQ ID NO: 1926 - DNA, 171 bp, Artificial Sequence
  Synthetic
gagtcggcatagctatattggttttagagctagaaatagcaagttaaaataaggctagtccgttatcaacttgaaaaagtggcaccgagtcggtgcctggggaattgtgtctatatagctatgccgtgaaagaacgcggttctatctagttacgcgttaaaccaactagaa

SEQ ID NO: 1927 - DNA, 170 bp, Artificial Sequence
  Synthetic
gagtcggcatagctatattggttttagagctagaaatagcaagttaaaataaggctagtccgttatcaacttgaaaaagtggcaccgagtcggtgctggggaattgtgtctatatagctatgccgtgaaagaacgcggttctatctagttacgcgttaaaccaactagaa

SEQ ID NO: 1928 - DNA, 169 bp, Artificial Sequence
  Synthetic
gagtcggcatagctatattggttttagagctagaaatagcaagttaaaataaggctagtccgttatcaacttgaaaaagtggcaccgagtcggtgcggggaattgtgtctatatagctatgccgtgaaagtacgcggttctatctagttacgcgttaaaccaactagaa

SEQ ID NO: 1929 - DNA, 168 bp, Artificial Sequence
  Synthetic
gagtcggcatagctatattggttttagagctagaaatagcaagttaaaataaggctagtccgttatcaacttgaaaaagtggcaccgagtcggtgcgggaattgtgtctatatagctatgccgtgaaagagcgcggttctatctagttacgcgttaaaccaactagaa

SEQ ID NO: 1930 - DNA, 167 bp, Artificial Sequence
  Synthetic
gagtcggcatagctatattggttttagagctagaaatagcaagttaaaataaggctagtccgttatcaacttgaaaaagtggcaccgagtcggtgcggaattgtgtctatatagctatgccgtggaaagacgcggttctatctagttacgcgttaaaccaactagaa

SEQ ID NO: 1931 - DNA, 166 bp, Artificial Sequence
  Synthetic
gagtcggcatagctatattggttttagagctagaaatagcaagttaaaataaggctagtccgttatcaacttgaaaaagtggcaccgagtcggtgcgaattgtgtctatatagctatgccgtggaaagacgcggttctatctagttacgcgttaaaccaactagaa

SEQ ID NO: 1932 - DNA, 165 bp, Artificial Sequence
  Synthetic
gagtcggcatagctatattggttttagagctagaaatagcaagttaaaataaggctagtccgttatcaacttgaaaaagtggcaccgagtcggtgcaattgtgtctatatagctatgccgtggaaagacgcggttctatctagttacgcgttaaaccaactagaa

SEQ ID NO: 1933 - DNA, 164 bp, Artificial Sequence
  Synthetic
gagtcggcatagctatattggttttagagctagaaatagcaagttaaaataaggctagtccgttatcaacttgaaaaagtggcaccgagtcggtgcattgtgtctatatagctatgccgtggaaagacgcggttctatctagttacgcgttaaaccaactagaa

SEQ ID NO: 1934 - DNA, 174 bp, Artificial Sequence
  Synthetic
gagtcggcatagctatattggttttagagctagaaatagcaagttaaaataaggctagtccgttatcaacttgaaaaagtggcaccgagtcggtgcctggggaattgtgtctatatagctatgccgactgaaagaaccgcggttctatctagttacgcgttaaaccaactagaa

SEQ ID NO: 1935 - DNA, 173 bp, Artificial Sequence
  Synthetic
gagtcggcatagctatattggttttagagctagaaatagcaagttaaaataaggctagtccgttatcaacttgaaaaagtggcaccgagtcggtgcctggggaattgtgtctatatagctatgccgacgaaagaagcgcggttctatctagttacgcgttaaaccaactagaa

SEQ ID NO: 1936 - DNA, 172 bp, Artificial Sequence
  Synthetic
gagtcggcatagctatattggttttagagctagaaatagcaagttaaaataaggctagtccgttatcaacttgaaaaagtggcaccgagtcggtgcctggggaattgtgtctatatagctatgccgaaataaattcgcggttctatctagttacgcgttaaaccaactagaa

SEQ ID NO: 1937 - DNA, 170 bp, Artificial Sequence
  Synthetic
gagtcggcatagctatattggttttagagctagaaatagcaagttaaaataaggctagtccgttatcaacttgaaaaagtggcaccgagtcggtgcctggggaattgtgtctatatagctatgccaaataaagcgcggttctatctagttacgcgttaaaccaactagaa

SEQ ID NO: 1938 - DNA, 169 bp, Artificial Sequence
  Synthetic
gagtcggcatagctatattggttttagagctagaaatagcaagttaaaataaggctagtccgttatcaacttgaaaaagtggcaccgagtcggtgcctggggaattgtgtctatatagctatgcataaaggacgcggttctatctagttacgcgttaaaccaactagaa

SEQ ID NO: 1939 - DNA, 168 bp, Artificial Sequence
  Synthetic
gagtcggcatagctatattggttttagagctagaaatagcaagttaaaataaggctagtccgttatcaacttgaaaaagtggcaccgagtcggtgcctggggaattgtgtctatatagctatgaaataaaccgcggttctatctagttacgcgttaaaccaactagaa

SEQ ID NO: 1940 - DNA, 167 bp, Artificial Sequence
  Synthetic
gagtcggcatagctatattggttttagagctagaaatagcaagttaaaataaggctagtccgttatcaacttgaaaaagtggcaccgagtcggtgcctggggaattgtgtctatatagctataattaaatcgcggttctatctagttacgcgttaaaccaactagaa

SEQ ID NO: 1941 - DNA, 97 bp, Artificial Sequence
  Synthetic
gctggggaattgtgtctatatgttttagagctagaaatagcaagttaaaataaggctagtccgttatcaacttgaaaaagtggcaccgagtcggtgc

SEQ ID NO: 1942 - RNA, 42 nt, Artificial Sequence
  Synthetic
uugacgcgguucuaucuasuuacgcguuaaaccaacuagaaa

SEQ ID NO: 1943 - RNA, 56 nt, Artificial Sequence
  Synthetic
gggucaggagccccccccugaacccaggauaacccucaaagucggggggcaacccc

SEQ ID NO: 1944 - RNA, 160 nt, Artificial Sequence
  Synthetic
ggaauugcgggaaaggggucaacagccguucaguaccaagucucaggggaaacuuugagauggccuugcaaaggguaugguaauaagcugacggacaygguccuaaccacgcagccaaguccuaagucaacagaucuucuguugauauggaugcaguuca

SEQ ID NO: 1945 - RNA, 13 nt, Artificial Sequence
  Synthetic
ugguggugguggu

SEQ ID NO: 1946 - RNA, 21 nt, Artificial Sequence
  Synthetic
ugggcugggaugggaaagggu

SEQ ID NO: 1947 - RNA, 43 nt, Artificial Sequence
  Synthetic
gcguaaccuccauccgaguugcaagagagggaaacgcagucuc

SEQ ID NO: 1948 - DNA, 30 bp, Artificial Sequence
  Synthetic
taaaagtcctctcctgctacggaagtctgt

SEQ ID NO: 1949 - DNA, 30 bp, Artificial Sequence
  Synthetic
taaaagtctcttttcgctacggaagtctgt

SEQ ID NO: 1950 - DNA, 30 bp, Artificial Sequence
  Synthetic
taaagactctccttcgctacggaagtctgt

SEQ ID NO: 1951 - DNA, 30 bp, Artificial Sequence
  Synthetic
cgggagtcctccttcgctacggaagtctgt

SEQ ID NO: 1952 - DNA, 30 bp, Artificial Sequence
  Synthetic
taaaagtcctcccctgctacggaagtctgt

SEQ ID NO: 1953 - DNA, 30 bp, Artificial Sequence
  Synthetic
taaaagtcccttttcgctacggaagtctgt

SEQ ID NO: 1954 - DNA, 30 bp, Artificial Sequence
  Synthetic
taaaagctttccttcgctacggaagtctgt

SEQ ID NO: 1955 - DNA, 30 bp, Artificial Sequence
  Synthetic
taaggatcctccttcgctacggaagtctgt

SEQ ID NO: 1956 - DNA, 30 bp, Artificial Sequence
  Synthetic
cggaagtcctccttcgctacggaagtctgt

SEQ ID NO: 1957 - DNA, 30 bp, Artificial Sequence
  Synthetic
taaaagtcctcccccgctacggaagtctgt

SEQ ID NO: 1958 - DNA, 30 bp, Artificial Sequence
  Synthetic
taaaagtcctttttcgctacggaagtctgt

SEQ ID NO: 1959 - DNA, 30 bp, Artificial Sequence
  Synthetic
taaaagtctcccttcgctacggaagtctgt

SEQ ID NO: 1960 - DNA, 30 bp, Artificial Sequence
  Synthetic
taaaagctctccttcgctacggaagtctgt

SEQ ID NO: 1961 - DNA, 30 bp, Artificial Sequence
  Synthetic
taaagatcctccttcgctacggaagtctgt

SEQ ID NO: 1962 - DNA, 30 bp, Artificial Sequence
  Synthetic
taggagtcctccttcgctacggaagtctgt

SEQ ID NO: 1963 - DNA, 30 bp, Artificial Sequence
  Synthetic
cgaaagtcctccttcgctacggaagtctgt

SEQ ID NO: 1964 - DNA, 30 bp, Artificial Sequence
  Synthetic
taaaagtcctcctttgctacggaagtctgt

SEQ ID NO: 1965 - DNA, 30 bp, Artificial Sequence
  Synthetic
taaaagtcctccctcgctacggaagtctgt

SEQ ID NO: 1966 - DNA, 30 bp, Artificial Sequence
  Synthetic
taaaagtccttcttcgctacggaagtctgt

SEQ ID NO: 1967 - DNA, 30 bp, Artificial Sequence
  Synthetic
taaaagtcttccttcgctacggaagtctgt

SEQ ID NO: 1968 - DNA, 30 bp, Artificial Sequence
  Synthetic
taaaagccctccttcgctacggaagtctgt

SEQ ID NO: 1969 - DNA, 30 bp, Artificial Sequence
  Synthetic
taaaggtcctccttcgctacggaagtctgt

SEQ ID NO: 1970 - DNA, 30 bp, Artificial Sequence
  Synthetic
tagaagtcctccttcgctacggaagtctgt

SEQ ID NO: 1971 - DNA, 30 bp, Artificial Sequence
  Synthetic
caaaagtcctccttcgctacggaagtctgt

SEQ ID NO: 1972 - DNA, 30 bp, Artificial Sequence
  Synthetic
taaaagtcctccttcgctacggaagtctgt

SEQ ID NO: 1973 - DNA, 26 bp, Artificial Sequence
  Synthetic
gtctgacttacacgaaactaccgtct

SEQ ID NO: 1974 - DNA, 26 bp, Artificial Sequence
  Synthetic
gtctagtccgtgcgaaactaccgtct

SEQ ID NO: 1975 - DNA, 26 bp, Artificial Sequence
  Synthetic
actcgactcgtgcgaaactaccgtct

SEQ ID NO: 1976 - DNA, 26 bp, Artificial Sequence
  Synthetic
gtctgactcacacgaaactaccgtct

SEQ ID NO: 1977 - DNA, 26 bp, Artificial Sequence
  Synthetic
gtctgatctgtgcgaaactaccgtct

SEQ ID NO: 1978 - DNA, 26 bp, Artificial Sequence
  Synthetic
gtccagctcgtgcgaaactaccgtct

SEQ ID NO: 1979 - DNA, 26 bp, Artificial Sequence
  Synthetic
acttgactcgtgcgaaactaccgtct

SEQ ID NO: 1980 - DNA, 26 bp, Artificial Sequence
  Synthetic
gtctgactcgcacgaaactaccgtct

SEQ ID NO: 1981 - DNA, 26 bp, Artificial Sequence
  Synthetic
gtctgacttatgcgaaactaccgtct

SEQ ID NO: 1982 - DNA, 26 bp, Artificial Sequence
  Synthetic
gtctgatccgtgcgaaactaccgtct

SEQ ID NO: 1983 - DNA, 26 bp, Artificial Sequence
  Synthetic
gtctagctcgtgcgaaactaccgtct

SEQ ID NO: 1984 - DNA, 26 bp, Artificial Sequence
  Synthetic
gttcgactcgtgcgaaactaccgtct

SEQ ID NO: 1985 - DNA, 26 bp, Artificial Sequence
  Synthetic
acctgactcgtgcgaaactaccgtct

SEQ ID NO: 1986 - DNA, 26 bp, Artificial Sequence
  Synthetic
gtctgactcgtgtgaaactaccgtct

SEQ ID NO: 1987 - DNA, 26 bp, Artificial Sequence
  Synthetic
gtctgactcgcgcgaaactaccgtct

SEQ ID NO: 1988 - DNA, 26 bp, Artificial Sequence
  Synthetic
gtctgacttgtgcgaaactaccgtct

SEQ ID NO: 1989 - DNA, 26 bp, Artificial Sequence
  Synthetic
gtctgattcgtgcgaaactaccgtct

SEQ ID NO: 1990 - DNA, 26 bp, Artificial Sequence
  Synthetic
gtctaactcgtgcgaaactaccgtct

SEQ ID NO: 1991 - DNA, 26 bp, Artificial Sequence
  Synthetic
gtttgactcgtgcgaaactaccgtct

SEQ ID NO: 1992 - DNA, 26 bp, Artificial Sequence
  Synthetic
atctgactcgtgcgaaactaccgtct

SEQ ID NO: 1993 - DNA, 26 bp, Artificial Sequence
  Synthetic
gtctgactcgtgcgaaactaccgtct

SEQ ID NO: 1994 - DNA, 29 bp, Artificial Sequence
  Synthetic
tgagaatcagtggcagactctacaagcaa

SEQ ID NO: 1995 - DNA, 29 bp, Artificial Sequence
  Synthetic
tgagaatcgacgatggactctacaagcaa

SEQ ID NO: 1996 - DNA, 29 bp, Artificial Sequence
  Synthetic
tgagggctagtaatggactctacaagcaa

SEQ ID NO: 1997 - DNA, 29 bp, Artificial Sequence
  Synthetic
cagaaatcagtaatggactctacaagcaa

SEQ ID NO: 1998 - DNA, 29 bp, Artificial Sequence
  Synthetic
tgagaatcagtagcagactctacaagcaa

SEQ ID NO: 1999 - DNA, 29 bp, Artificial Sequence
  Synthetic
tgagaatcaacgatggactctacaagcaa

SEQ ID NO: 2000 - DNA, 29 bp, Artificial Sequence
  Synthetic
tgagaactggtaatggactctacaagcaa

SEQ ID NO: 2001 - DNA, 29 bp, Artificial Sequence
  Synthetic
tgaaggtcagtaatggactctacaagcaa

SEQ ID NO: 2002 - DNA, 29 bp, Artificial Sequence
  Synthetic
caggaatcagtaatggactctacaagcaa

SEQ ID NO: 2003 - DNA, 29 bp, Artificial Sequence
  Synthetic
tgagaatcagtagcggactctacaagcaa

SEQ ID NO: 2004 - DNA, 29 bp, Artificial Sequence
  Synthetic
tgagaatcagcgatggactctacaagcaa

SEQ ID NO: 2005 - DNA, 29 bp, Artificial Sequence
  Synthetic
tgagaatcgataatggactctacaagcaa

SEQ ID NO: 2006 - DNA, 29 bp, Artificial Sequence
  Synthetic
tgagaactagtaatggactctacaagcaa

SEQ ID NO: 2007 - DNA, 29 bp, Artificial Sequence
  Synthetic
tgagggtcagtaatggactctacaagcaa

SEQ ID NO: 2008 - DNA, 29 bp, Artificial Sequence
  Synthetic
tggaaatcagtaatggactctacaagcaa

SEQ ID NO: 2009 - DNA, 29 bp, Artificial Sequence
  Synthetic
caagaatcagtaatggactctacaagcaa

SEQ ID NO: 2010 - DNA, 29 bp, Artificial Sequence
  Synthetic
tgagaatcagtaatagactctacaagcaa

SEQ ID NO: 2011 - DNA, 29 bp, Artificial Sequence
  Synthetic
tgagaatcagtagtggactctacaagcaa

SEQ ID NO: 2012 - DNA, 29 bp, Artificial Sequence
  Synthetic
tgagaatcagcaatggactctacaagcaa

SEQ ID NO: 2013 - DNA, 29 bp, Artificial Sequence
  Synthetic
tgagaatcggtaatggactctacaagcaa

SEQ ID NO: 2014 - DNA, 29 bp, Artificial Sequence
  Synthetic
tgagaaccagtaatggactctacaagcaa

SEQ ID NO: 2015 - DNA, 29 bp, Artificial Sequence
  Synthetic
tgaggatcagtaatggactctacaagcaa

SEQ ID NO: 2016 - DNA, 29 bp, Artificial Sequence
  Synthetic
tgggaatcagtaatggactctacaagcaa

SEQ ID NO: 2017 - DNA, 29 bp, Artificial Sequence
  Synthetic
taagaatcagtaatggactctacaagcaa

SEQ ID NO: 2018 - DNA, 29 bp, Artificial Sequence
  Synthetic
tgagaatcagtaatggactctacaagcaa

SEQ ID NO: 2019 - DNA, 25 bp, Artificial Sequence
  Synthetic
tggggaattgtgacaatatagctat

SEQ ID NO: 2020 - DNA, 24 bp, Artificial Sequence
  Synthetic
tggggaattgtgcaatatagctat

SEQ ID NO: 2021 - RNA, 138 nt, Artificial Sequence
  Synthetic
gagggacuccuagaggacugguuuuagagcuagaaauagcaaguuaaaauaaggcuaguccguuaucaacuugaaaaaguggcaccgagucggugcauagcuauauugucacaauuccccaguccucuaggagucuuu

SEQ ID NO: 2022 - DNA, 42 bp, Artificial Sequence
  Synthetic
gagggactcctagaggactggggaattgtgcaatatagctat

SEQ ID NO: 2023 - DNA, 52 bp, Artificial Sequence
  Synthetic
tcggcatagctatattgacacaattccccagtcctctaggagtccctcctac

SEQ ID NO: 2024 - DNA, 93 bp, Artificial Sequence
  Synthetic
ggttttgctcgtaatctgtcagaaggcaataatgctaattacacagagtacgttgccaccagatggtatcggtccccagaactcttacttggc

SEQ ID NO: 2025 - protein, 31 aa, Artificial Sequence
  Synthetic
GFARNLSEGNNANYTEYVATRWYRSPELLLG

SEQ ID NO: 2026 - DNA, 93 bp, Artificial Sequence
  Synthetic
ggttttgctcgtaatctgtcagaaggcaataatgctaattacacagagtacattgacaccagcsggtgtcgctccctagagcccttacttggc

SEQ ID NO: 2027 - DNA, 165 bp, Artificial Sequence
  Synthetic
gaaggcaauaaugcuaauuacaguuuuaguacucuggaaacagaaucuacuaaaacaaggcaaaaugccguguuuaucucgucaacuuguuggcgagaugccaagtaagagttctggggaccgataccatctggtggcaacgtactctgtgtaattagcattttt

SEQ ID NO: 2028 - DNA, 36 bp, Artificial Sequence
  Synthetic
gaaggcaataatgctaattacacagagtacgttgcc

SEQ ID NO: 2029 - DNA, 51 bp, Artificial Sequence
  Synthetic
tacacagagtacgttgccaccagatggtggtatcggtccccagaactctta

SEQ ID NO: 2030 - DNA, 19 bp, Artificial Sequence
  Synthetic
ttgcacaattccccagtcc

SEQ ID NO: 2031 - DNA, 19 bp, Artificial Sequence
  Synthetic
aacgtgttaaggggtcagg

SEQ ID NO: 2032 - DNA, 20 bp, Artificial Sequence
  Synthetic
ttgacacaattccccaatcc

SEQ ID NO: 2033 - DNA, 20 bp, Artificial Sequence
  Synthetic
aactgtgttaaggggttagg

SEQ ID NO: 2034 - DNA, 34 bp, Artificial Sequence
  Synthetic
ttgcacaattccccagtcctctaggagtccctcc

SEQ ID NO: 2035 - DNA, 34 bp, Artificial Sequence
  Synthetic
ggagggactcctagaggactggggaattgtgcaa

SEQ ID NO: 2036 - DNA, 35 bp, Artificial Sequence
  Synthetic
ttgacacaattccccagtcctctaggagtccctcc

SEQ ID NO: 2037 - DNA, 35 bp, Artificial Sequence
  Synthetic
ggagggactcctagaggactggggaattgtgtcaa

SEQ ID NO: 2038 - DNA, 29 bp, Artificial Sequence
  Synthetic
agagtcggcatagctatattgcacaattc

SEQ ID NO: 2039 - DNA, 29 bp, Artificial Sequence
  Synthetic
gaattgtgcaatatagctatgccgactct

SEQ ID NO: 2040 - DNA, 30 bp, Artificial Sequence
  Synthetic
agagtcggcatagctatattgacacaattc

SEQ ID NO: 2041 - DNA, 30 bp, Artificial Sequence
  Synthetic
gaattgtgtcaatatagctatgccgactct

SEQ ID NO: 2042 - DNA, 11 bp, Artificial Sequence
  Synthetic
atctactccta
